United States Patent Application Publication US 2004/0072264 A1 - sequence listing, part 3

SEQ ID NO: 175 - DNA, 96592 bp, Mus musculus
  misc_feature (22474)..(22493): "n" at positions 22474 to 22493 can be any base
  misc_feature (20734)..(30753): "n" at positons 30734 to 30753 can be any base
  misc_feature (47597)..(48214): "n" at positions 47597 to 48214 can be any base
  misc_feature (51244)..(51460): "n" at positions 51244 to 51460 can be any base
  misc_feature (78053)..(78072): "n" at positoins 78053 to 78072 can be any base
  misc_feature (81276)..(81392): "n" at positions 81276 to 81392 can be any base
  misc_feature (85644)..(85778): "n" at positions 85644 to 85778 can be any base
tcagaatttgactgtcctaaagaaccttcttccgctgtgcgagtctgggcaggcagaacattcaggagaaaccacagggaaacaggtctgtttttaaaatttccttttcatgctctgtttcccttttacctcctctcctgttctttccatatctactgtcattttgctacccagaaaacctagtgattcctcccagctgacagggctgagcttgtgtttccacggagtccaggttcatggcaggcctgttgaatatggccctggaatgacgtgctttcctgctctttatttatcagagcctatgactcatagggcctagtggactacgcttccaaaaagcattagtttttgttattttccagttagcatacaaactgtttcagaatgacagtctcagacagacagccaaacagacagacagagagataattttactttgtttaattttacccttgtccctcttcacccttcctgctaatcttccttcacacaaacaattcctcttctgtttccatgtcatatagatatgtacactccccccacacacacataccccacacacactcacacagaccccttttactttcatatcaaccattcttttctattggggaaggtagggtaggtatgccccacggtgagcacatagaagtcaggagatcactctccagagttctctcctgccaccctgtgggatccagggttcaaacctaggtcatcaggcctggaccaaagggcctcttaccactgacccatctcaccagccttattcaggttttttccccttcaatctgcatatgatagaaaacttgtagtatttcttgttcaaaatctggcttctttgatttatttgcctctctagttccatctagcatacaaactatttcagaatgacactcttaggtagatagatagatagatagatagatagatagatagatagatagatgcatacatacatacatacatacatacatacatacatagatacagatagacagagacatttcattttctacacttaaatacatctctgctatgtctatgcaccacatttgctctattcagtcatctgctaatagacacccatgctggttccatatccctactactataaatagtgctacatgaacatgaatgtacaagtcatctgtctaaaatgctgcctcagattgcttcaggtatatacttaggaatggtacagtttggtcatatagtcattcttttttgtttctgatgaacctccatgctaacttctatatggctactctggttacatactctacagtagcgtatgaacatctgttcccctacatatctgctccagaacttattggatttttttttgaggttgttttcagccattgtgtatacagtgggatggaatctcagttctgtttgttggttggtctgttgtttagagacagggtcttccatagcttagtgtacagtatgtagactgtggaccaggctagtctcaaactctccctgatgttcctgcttatttttcctaattgttatgatcacacatgtatgccaacaaacctggcttcattgcagctttctgaagttttatttttagatttatttgttttatttttatatgtttgcctatatgtgtgtacatgtacatgtgtgggccacatatgtgtgtggtccttgcagaggtcagaagagggtgtcagatctcctggaactggagttacagatggttgtgaaccatatctgaaaactatacccgaatcttccacaagagtatgtatgctcataactgctaagacacctccacaacctcaatgtagcttcaatttacattttcctatggctaatgttcctatgaacaattttatattttatatgtatttattggctaattcacttcttttgagaactgccttttttaatttatctgtccattcattgattgactttgtcttttgtaattttgagtcagggttaaagtttttgaattctttctatattctagatatataaagattaatagttggcaggaatttttctcccaaagatcctgaacgttaatgctttccctcaaggttcactttagctgtcttgcttaaagcttgataaaaaaactaaagtcctttccaatcagacacgtgtgagcaagttttccctgagccacaagctgcagtgcaggaaactatctggatcaaaaacgtgttctcgtgatttccattaagggattgtctcttgttccctgtcccctaagcgagtgctgataacagtcctccataccttagcacgtaagtcaatcattaacaatgggctgtacttttcactgggttgtaaagaataagaagtcagagctacagaaatctcctttcttgaggtaggcagtggaaggaagagtgtcacttgcctgtaaacctcataaccaatatgtagcaggctgcagcccaacacgcaggggacgtgtccgaacagaggagagtcacaggtaaggaatacgggtccatttctgtttctctatccattctgattctctcttctcacctttccaatctgtggactaaaaatgaacagggtcaaggtgtgattacagtatcagtggtagaaagaggtttctatggactgacctgtgttttaacaagagatgggcattagatgttagttaattcacaatctccgtctgactccttcaagactgatttcttacaaacatctgacttcttcaagactcggagttccagagagaaaatgtatgtcagttacaggagcaaagatcagcgcaacagcagtggtcacatgacaggccagtccttggggaggataaagatgaattagtgtggacttgggaacatctccagatcctactcaaaggcaaaaggaggttagatggtaaatttgaaagaattgctacaaactgcgccaaaggaaaggaattatgcttatttctctttttttgacagactttgggggttttttggtgttttgtttggtttggtttggtttggtttggtttggtttggtttggtttggttggttgtttttttgcaatgatttgttttaaaataaatttgtcttctttagaaagcttccagatactcactttcctttctcaacgactttcttctgctattacatgtggcattcttgtgacacatttatgacgacgaaccaacgttagcatgctatctacttaagctcttacactatctacattaacattgagtatttgtctcagatatttttatgggttttaagaaatgcataatgacacatcactgacttgtacaaaatagtcccatgatcctaaaagtcccatgttctacctagttctctttccccactcccctaccaagcccctcaaaaccactcaccatttttcctgactccatggctttacccggtctaaagggtcgcctggttgcaatgaagtagaacgtggtcttttcggattggtttgaattagtagtgtgcttttgagttttttctgcatctttctgtggctcagtagcacatccctctttgtcgctgagtaacatatgactatgtgactaaactacagcaaatgtatccagttgggcaaatgttttagcatggtagaaagtggaaacgataaaggtggggggagtttagaaagtggcagtactataaacgtgatagaagcaagaagaacacgaagtagaaaaactagctagaaagctaaacacagatgcctcagttgaaataaaaatttttttaaaagctctggttctagggtggcgccagctcttttctaagcatatagattatgctgggagacacattaccttcaacccaagagcctacacatggtaggcaccccataacatttttgaagcccccaaactccaagactttttccaaaaagaggcttccccaagacaccagcttattggctcagaagccatatcagggaagctgtagctgcttggtcagatgagcctttgcatgccataggataagaaaatattcccttgataacctttgtttgaccgtggcttatggaagctatgagtataagcaaagaactcatgtttcaacctaatcacagaagtagcccaaacaatttccatgtaacaacaacaaaggctatgagaagatgagccagctatgccttcaaatgttcaccacattctagagcagagaacagtcatgtaccattatcagtagcccatgcaatgatgtaggagcccagtccaaggtgatgcagcttacagtatggctgtgtagttgtccagggaaactgatgggccagctggggcttgcagaacctaaagagacctgcaagtagcaatttgctaactcagtggggctaccatgcaaaaaaagctgatcacccaggctagtcaatgtattggttcaaaatcatcaactgcttaaaaccaggttctctgccagagcatagcattgctattccttaatgcccagattcctttcttactgtgtgatgaaatggggaattagccagacatgaagataggaccttgtgattcagagcttttcatgtcctctactaagttaacttacacactcagcacaggctaaaaaatacctgaggattttctacacaagacaaatctgggaactgctttgcccaaaggctattctgtagagtggagctcatccaaagacttacaacttactgcttgtctcggtttatgcttacacaacaagagggcttgaccatcattgtagacagtttagaatggatggtggatttggaggcatcggaataagcaatgtgtagctctctatcccactcaaagctcctggatgggaatacttgaagaaggagatgtctatgtgaagactgattctgtgagcacatctgccgacctagagatcttcaagccacagggcaatagaaacatctcaagcaacttccgtgtaatgagaaatgagcagaggagaatcagactctgattccaacacagcatcagctggggaagcagctgcctctatgcatcagcttctagccacttctgcttgtctggcttgtctctagagcatatcctgaacataaagtgcctgagacaggaacaagcagtacctaggctaaagccacaatgacacagaacttaccttgcttgtgcaaagcaccagactcactttcagaacctggggcaagtctagatccccaattttgaaaagcattttgatgatttcatatatctataggatggatttttttgtcattttcatgtgagcacatgtgtctcccccttctcctgctggaatttttctcaactggtgtcccatgttctctttttctgtgtgtatggtgccagataattgactccaaatttttctgggagaaatgtgcatctatatctcaagactttgttttcaaggaactaaccaaataggatgtccatcttacttccttgtttatttgtattttcttttatgtctagaagaaattagtcatgaaaaatctaagaccaagtccaacatttggtagtaggggagaggaagagaaggcaaggtactgtgtcctgggaatgtgactgattttccagacaaaccttctcgtcttcttgtccacattttctcgtgatttgtttcagaacccttcctgacctcactcttttgaccttatttcatgctcttctctccacctgcctgatagtactcagctgcagacacaggacacatttatgcatctctcatcagtatagggctcaggattatcccccaagggatatggcgtgggtgcaaagatgagagcacaaggcagagaatgtcacgagatggacacaatctcttccatagaagccctcatttttagggatattaaaggacagacactatggcagaaaattgtacaatgtccttggcattataaagttaaactctgggccctttgaccatccatatgttctctccatgtaggttaatcaaccacaaattatataacaggataggggttggaaatacaaaggtggatgaagtagcccttgttcccaaagagctaatgggtgagactggctcatgggtccatgatggtggcaaaaagtacggtgacctgggaccacatcacagaaacttgtaatgaggtcagctcaagaggccctgggatcacattgtgatatacgatagagctcctaagtaccaaactgaaagatgaagctgagaggaagatgtctgcggagagcattacactggaaagagaagccccagagagcagagaacagaagcacagaagtaatacagtggtagctggaagactgcaggtcaaataaaggaaattgtgatgtttgtcctggggagaagtgatacctgaaacagaaacagggctagcccctctggatggacttaagccatgcaagaagatagagactaaggaaaaccatcagagcattgcagatagatgaggcatgaagggagatttgcatttgaggaaggaaaagtctggatggaatgtgaagaatagtttaaaggagacaaaacagaagacttggaaaacacgtgggaggctgttgacatgaggtggcttagaaacagtgttcctaggaagtctcgttctacacctgtcacctcagggttcctgatgacccgtgagcaagactttctagaaagagccggttcattaatcacgtcacttctgtggtattaataaagcaactatcatggctttattttgtatcgacaacactatcatgtaaatattccttactgataagggccagtctccctcagcatttgtcagccactaggctcagggagccagctaccttgcatttcttcactgcctctgtaaagagaagttttctctttgattatgagtagatacacaactgccttgatgcttgttctagcacagcggaagaggataactaccagggaaactcgccaatcacaaggaaatccgagtgtttctctcgtaccccagtgttgtcagttaggtttcatttcaaagtcaagattgttcaagccaaagtacaattggttttaaatgctgtctttaaagaaggaatatgttagagaaaattgcttgacactcattagtgtgaagcatgagggcagcacttcatggctgtgactcagtctaaaaatttcatcatctctactagtttgccagggtggccatagcgaagcctagccaactgggggatctcaaatgacagaaagatattgcagttgggaggccaggaaacagaaatcaaggtgatcaaggtagcaaaagtggctgtcttctgaagtcagtgaggaagaatctgttccttgtctttctcttcactactaatgggaatcggttgcactccttggctcatagaacacccttgcctcttttttaatgctgacatggttctctctctctactctctctctctctctctctctctctctctctctctctgtgtgtgaggggagatttatctttgtcagtatgaacccatatgtctagaccgagccatcccattttaataagttagactgaagcaaagcccatcataatgggctcctctcagctgcgtccctctgcgatgaccttttttccaaataagatccaattctgagatgtcaagtgttcttatgtttcaacataagaatttgttgtacattgacagatacaattcagtccaaataccacctaatatgatttcaaaattaaataagttatcttctatttaaaaaaaataaaaccttgaagatcctccagtttctgagttcttcttctgtttctttcttgagagacttgaagttcttctcatacagatttttcacttctttggatagagttaccctaagatattttatattatttgtgaatattatgaagggtgttgtttccctaatttctttctcagcctgtttatcctttgcgtagatgaaagctactggttggtttgagttaattttatatccagccactttgctgaagttgtttatcagctggagaagctctcaggttgaatttctggagtcgtttatgtatactatcatatcatctccaaatagtgataccttgacttctttgccaatttgtatccacttgatctccttttgttgtcttatagttctagctagaactttgagtactatattgaatagatagggagagagtgggcagccttgtcttgtccctagttttagtgggattgcttcaagtatctctccatttaacttgatattggctattggtttgctgtgtattgcttttattatatttaagtatgaaccttgaatacctgatacttccaccacttttaacatgaaagggtgttgtattttgtcaaatgccttttcagcatccaataagatgtcgatgtgattttttttctttcagtttatttatatagtggattgtattaatggattttcatagtgaaacaaccttccatgcctgggatgaagcctacttgatcatggtgaatgtggttgatcgctttgatctgttcttggatttgttttgtaagaattttattgagtatttttgcctcaatgttcatagggaaattattctgaagttctctttttttggttgggtctttgtatagtttaggtattagagtaattttggcttcataaaatgaattaggcagtattcttaatgtttctattttatggaatagtttgaggagtgctggtattagctcttcttctgcactaaagccatctggccctgggctcttttattggggtggggggatttttaattacttctatttacttaggggatatgggtctctttagataatttacctgctcttgatttaactttggttcatgattctagttttgttgattcttttatctctttgtttctatttggttgactcagccctgagtttgactatttcctgtcatcaactcctttggggtgtgtttgcttctttgttgttgttgttgttctaggactttcaggtgtactgttatgttgctagaggagaatctgtccaatttctttaccagggcacttagtttttttcagcactgctttcattgtgtcccataagtttaggtatgctgtgtcatcattttcatagaattccaggaagtctttaatatctttctttatttcttccctgaccaagttaccattgagtagagagttgttcagtttccaggtgtatgtgggttttctgttgtttttgttgttactaaagtctatccttagtctgtggtgatctgatgggatgcatgggactatttcaatcttcttataaaggttgaggtttgttttgtgactaattatatggccaattttgaagagggttccatgaggtgctgagaagaaattgtattcttttgttttcgagtgaaatgttctgtatatatctgttaaatccatttggttcataacctctattaatttcattgtgtctctgtttagtttctgtttcagtgacctgtccattagtgagagtggagtgttgaagtctcccactattattgtgaggggttcaatgtatgttttgagctttagtaaagtttcttttatgaatgtgggtgccaggataggagagtatgatgagatacaactgattttcagttgtcactgagagtttgtagtttgggtgagctagggcaaaatctatgaagtgaaggcattatgtcctcctgaagaacccagagaatgagtttttcaacatttgagccttgttcctatgggcctggataggaccaccatagtgagtcttagaatgtcatttcaacgtgccctggatgggatgaacacatgctgcctaggggagtagctgacgtgcatcaaagtgtttactcgacccagatcacatcagaatcaacccttgtaaaaataaataaggtatgttgattttttgtgcagatggttaaacaaatctgatggggcaaaatgagttctaggaataagggatatcagagggcaaagctgctgaagatagcaagagctgcacctggacaattttggggcatagtccctggcagctgtgagtggctgttctaggggactgcagtgccaagagaagaatacttgcctgccaaagagagaagctgactcaagggggcaaagtcaagctgagctgaattctagggaaacgtagaagagcaatcatccagagaggggctctgatagagctccctggccactgtctgctcttttcagaagtctggactccctgacctccaaggcctcctcaaggtatggagttctctccctcttggatgtttctatctcctttcactgatgctcagggagacttgtgacttgagctggaaaatactgctctgggagggaagaacggtctgttgtcctaaagcagtgtgaccttggaaatgtagctaaacttttctggactcgatgtctttctttgttttctgagattcttggagttctggaaatcatgggctcttctgggtgaaatggatcttagaaacctagcccagttttgtggctgaagaaactaatgctgaattgagagatttcattattgtcaggaaactaatctattaaaggcagggtacataaaacttgaagatcttccttctcaccaagaaccaattccacaaaggcccttggtgtcagaagcctacatttgttcctcctgagaatcctctgaagtacagtcttctacctgcctcagacttgtgcaaactggtttccccaatggcttcctgctgctgaataaaaagtcagaaccttacatgtcagacacatttcctgccacctccatttaccctcctgcagttccctctttctaactggcttcaagctgagtagaagcaaggatctgattgttgtgagtgggcaggttcatcagagggtacagatagaccaacaaaaagacttattccaagcaatatccagtttcccaaaggaaactcctatccaatggatgaaagatattattatgtaaggattgttttatgatttgatatgaatttaaatgatccgttgtgaaatagaatgcagggatatggcagcacaggttggatgggagctaactggatgttctgcagtgattggattctcctggatcaatatcctcctcctcccgccctccctgtcttatctttggcttagagagccaggtgcatccaagtacaggattcctgatcagcatcagcacctctcaaaatctaagagaaaagttggctcctctgggtaaactgaagccttagcaaggtactgatgcctcctctgggtgactatgttacaccttccaaagtgatttggcttttatgtcccagttagatggtttggtgtcagcagcatattgtagcttacattgaggataagttaagttattggtcccaccccccactttttttttttttttttttttttgaaacaaggtctctcactgaacctggaccaatttgccaagagtaccaaatcaagccataagcagtctcctgtttccgcatccccagccctaggatcaaaggcatgtgctactaacacctgggcttatagatggatgctgcagatgtagaactcaggtccttttgcttagtgcagcagacacattacagacaaatctgtctccccagccctcattttgttcattcaaatatcatccaaatttatctgtgatagtataaatgagtgagttgccattccccttctcacactaagcctttgaaattcaggatgaatttcatactaacagtgtgcccttcaataatacagatatatttccgatggagtctgctgccatccaggataacacatttgtgcaggaatatgtgctttgagccctgtggtgtctaaggtgtatctttcaacccagatctttgacgtgttagagagcagtgacatggttggagtcacgcattctgtttcagggattctgagcagaaacgagccaggaaatagtgaccgttccctggctaaccattcctccccagaagcatcaatgttccagtcccaggcagctttccagactgccctaatcccttgacatgcctccaatgctagttcccagcagtaagcatgtaagacacctgccttcccttggtagagttccagtgttaattattaacaaacaaatccacggtgcaccacagcaagatgtcactgtaaggctaccaagtttcctagaacatgtccaaaaggactttgttcccactgggttcctagtctgagtccagaccagtgtatacacaaacaatgggggtggtatttttattagaagaacttcaagctaccaatcctggagaacacacttggaagctttctctaggaaaatgtctgttcctatttgaccctcaaccagacaggtgtctgggaagaagaaaatcacactacctaagagggaactgcagtaaccatccatcacctctggcatatttatagataaattcacctattgtatgcagcaactgtaatggaggataagctttcaggagatttgatttactaatgacatagacacaaaggagtggcattcacacaccctggatattagagtggaggggatgtgggaactttgtcccattctagaatatgcatgaggcctctgaagtacagacaaggatggagcccagagtgcaaaactaacaagaagaggggcagattgcttcctacccaaggagagctggatatccaaagctcacttctgtaaagcctttctaggagttccttcaaattttgtttatgtgaaacaaagcttttcctaatgatgtaatgtggctttggcctaagtcacatcaaagtactgtcatcttaaactaggggttaattgtcgggtagttactatctgtatggccctggcacactcgacagctactccatttccgcaagtgcagagccctgtgactcactggggacgggcatgagcgttcttgccttactaggaagattgaataagcacagtcaaggtgcttagccatctattacagcagcaccataagtcctgcctttgttcaggtagcatcatggcctgaagacaggtccaggtagggtcattctcccaggcagagacaatatccaggtgtctatgtaatgatacgggtaccaggatcttgccaaatctgaccatcctagtccacccagactgttggtatggttttatcttctaacttaaaacaaatgctcttttggaggaaaaacttttaattagctgataatctgatgattatcaggacttcaatgtcatcaccagcactaaaagaccaaagtcttatgagcaagggcatacaaacatacatgtcttaggactcagtccatatagtcagatggccagttgttatctagattttaacactcttggcttacttgtctattacaaatactatggaattcaggtcatttggagactgccatctttcagttcagaaaaattattttgaaaatccttcagttcagaagaaattgaggttcttcaaaacccatgtttcttgctgtttgcagccactaattattccataaccctgaggttgcaacactgttcagtaatgggctgtgaacctaaaacaaagttatcatatgctaatatgaatgtctatggccaatcccaggccaagtaatccacttattccctgtggcttttcctccaatatcaatgcaagaggagtagggaacacacctgcatcctgaagaccctgtttgctatggcctggagctccttggacctggtgaaattaaatgaaaacaatatgatgatatcctctagagggagacctgggtctgaaatcaggatgctctctggtcataggaggcatggtgtgggcttgtaagcttgagtagaggacatgaagcttaagaccagggccttttattacaagccttttattggtgatgtacctctaacaaggtacatttggcaactaaaagtgtgtccagggaaaagctgctaagaatcagactgaggagcctagaaactctgaggagaagttagggtgcttcccccagagaaactggatgccaatctattgtttgaaagccagtcctatagaacaggtcttctttgttccaaataataaaaacaggagctaggtcaaggaaactgttgcaagttattctcttacttctacacgcatcatgcatgctgtcacacacacacacacacacacacacacacacacatatatatatatatatatatatatatatatatatatatatatatatatatatatgcacacacatgcatacacatacaaatgtgtatgtgcatgcacatgtacaaacaaatgaataaataggcaaataattgtaaagaaaatagttgaagtcagagcagtgaattgaatgaagattccaagacagagaccctgggtcctttaagctgcctgctctctaaggtgatgcttttcttggcatatgatggagaacaggggtaccagccatggaattgatggggcactaaagagcctgttagagagatgctaagaggctcatttgtggattttaagtgatgaacaaacaaagtgggtttatggttttggtgttctgcaaactgtgattttcgacttaggccatcccacatattaaaaataaaactaaaaataaaatcaggctccatgggctttacccatcccatcttagcatgtctgttattgttgtccttgctccattcacgtttagccaggcatgttggtgagcctttaagtacaacttctgaaattactagcaagcacaatctcacagcaaactccctgatcctctgcctctgacaatctttctgcctctcttccacaatgatccctgagccttgggtataggagtggtcttgtagattgggactgggatcctccatccatttggattggttgtggtttgctgggagggtttcactgtctgttgcatagaaaggtttcttcaatgaggggaaaactcaggggtgagcacgacacttctctgtgagtgtaaggactctagttaggaactatgccagcttagcaaagtgctgcttgcagtttctccatgacgtcactggcccttcctagttggctgggttcccaataccaggtgtgattttcctcttgtcaagtgggtcttaggtccaattagagaactgttggttactactaaggtatgtgtgccagtactactgaaccctttgtattaccatgacatattggttataatgataaccatatgtgttatatgtgtgtaatatacatgcaatatatatgctatttatgtgtagtatatatatatatttatgtgtattatatatatatttatgtgtttcacatatatgtatgtgtgagtgtatgtgtgtgtgtatgtgtgtgtgtgttccagttcatggctgtcatagacctactggctgcttctctcctttggaagcttgcatggtgcattctctaaccatgaaatctaatcctcaaggaacaggctttcaggtcaattcccgtttgggagcctctgtcactgcgtctgaactacttggtgtcttcagcattaagaacagaatgctaggaaggtgtgttgtaagtagtttgtggtattttgttttgttttgttttgttttgttgctaagccaatgggtcacaataagcagaatggtgatgtggctaagaacatgggctgtggaggctaaggccataaggttcaaatgccaagtcttctcttattggagtctgagaatgtggggcagttacataatttacttatgactgtgctttggtgtggagatagaaatgataatgtttgcccctgctgttatcactaggttttaatcacaactatctttgactcacaatgaacactcagtacatgctggaaatgattctcatagaaggaatattaccttttatttcttaagccaatgtgagaacttaaaaggcaccagcttgcaaacacagagactatgtctcttttgcattgtgttctaatgaaaggaaaattaaatgcacatacatttttattataattaggacacagttcaaaagtgataagccctgttggtctagggaatgactactcctatgacataaaggaaaatgaaatcaagtccagtatagatttttggccatgaagctcagagagtaagtaagatttctggaattcctatcattctatgtggctctatggcttattccccaagagaggcaaacaattaaggccctgtgcagaggtgcttccaccctggtgtacacagtgaagtagtaacagctgatggacgacctcattagccctcccctaagcctttctgtctcatcatgagtctcagctatgtgaccacgggaaacaggagagaaaaagatacaatggggaccacgtgtctctccttaagtactgcttatgatattgaggttgggggtctctgagccatttattcctcctctggttctttggaccacttgggcattggactctacacccctggcagatcaaggcacattctgtggctcttgggagccttcctgatcctatatggaatgacttagatcaatgggaggacagcagcagactcctgcagtcagtcaaagtggtttccactcctaggaggaacacaccagtttgtttctgtgtgaaatacagaaatatgacagctttgtcgcaacgctaagcaaaccattgtgtggcagaacaagcttctttttcacgtcagaggttgacacactggccccacagacaacaccaactgttccctttggaaacagaatggtggcaagaatgagcagttatgtggacatcatcattctggatcatctctaagatcaacattattttagaatgctgacaatgatatgttttgtgggcatgctccaggggaggattcagtacatggaaaatacatgctaatcatccacacataactgagggaatcataaagagtggatgatgccctgagggaatgtgtattatttacagagatatctccatgtcaagacccaatgcatcagatccatgggaaatcggcaaagccttctctggtctgagtatgactgttgacagtgtgtgcaagcacgggtgttcactaacaatttaccagtttgtgcaaaagctagcaactgcagcttcctccctgcaggtgtgtactgcctgagatagctcaaccttctttggagactagctaaccaaccccctgtctcgtagataacaaaaccccttacgtttcagactgcctcagtaactgatctcctccatgcaaagaagcatagcccatccaaacgcagctacacgtgtctgtgtctgtcctttcttcattccctcactgctcagtcaggtcacctccaagctgcacatggaacacagaacatccccatcaccttgggcccaagcgtctggcatatgcttccaatcttcaagttttgagtggagagaaaatgtgggctggaatctacaaatgtgagctggaagccattcctcatgataaccctcgctctttcttgcctttttcttttctgtgttttttttcttcatttattgcttatgacactagcaacgcaacctattggaataaaaatgtgtgcttcccagaacattgtctaacttacttctcaaagaaagggaccatttctgttgatagtaagacttggcttgaaagggccagttaaccctggccccagtttgtcttgatcaacatctctaaggcgtcctatatttgatctagcacctacagaaagagtagctacgctcagaagaaaaaaatatctctacaaaagattcacttgtatgaaatattttatacactaatctagctgaatcggtctctttctggtagaaaatacagtatccaaatatatagggagtaattatgataggtaagcctgataaagaagacctcagatcatgtgtgaccagataagcctagcaattgtctgaagacttcaaactaccccttaggactactgaaaggatgcctgaagaaaaacatctagaaacaagttttgtgtggaccaaacaaggagcaacagagaatttttgcacacagggagtctatgtaactgccccagtcatttctcctaaatctttttctgctagaaagacctttggtctggtcccactcatcattttaaaaagacttacaggattgaaatgattttagcctcttctttcttccttctttacagaaatgagttctgagacgagaagacttgggtggttaagtctgatgctgttaaatatatcaggggttgaaaagggcttagaagtgtaacattcagctgggcatggtggcacacgcctttaatcccagcactccggggggcagaagcaggcagatttctgagttcgaggccagcctggtctacaaagtgagttctaggacagccagggctatacagagaaaccctgtctcgaaaaaccaaaaagaacccaaacaaacaaacaaacaaacaaaaatgtaacattctgattgatggcatgtcccttgaaatgtttctgagctttactatgcattaaataacttgaaatgaatgcaagcatgcacagtgcttctttctgtcttactgaatttaaggatgccaaacaattctctcatttttcctttgctggaaggtgtggctcaccattctattagacaaaattgtagctgacctctaatacctaattagtgcaaaacaatgctacaattattgggcatgactttgacacgttttggctgctaatgcaaccactcctagttaaatagattggcaatgaagtttcaatgcaaactttgtcaatgaggccagcctactactagatatccaaccatatagacaggtaatggctgaacagatcttcattcctacaaaacctcaagaattatccattttgcaacttaagtatatgctgttcattacttttgtacaagcttgctctctctctctccctccaccccccccctctctctctctctctctctctcgtgtgtgtgtgtgtgtgtgtgtgtgttttaatggcttacgaatccacataggattcttgtacatattcattttggttatttattcccccttaattaatcccccttcatctccatgtctctccctgccctgctggacctaaccctcttctttgctatattctcttacccactgtccttcttttacatctttatttcaatcatgtggacccgtttctcattacctaggctttatccatactcacttctacttagagacacatgtttaacagtgaaaggataagattgccatctgaaaaagggtgtggggatatggcgtgtttatttttctgagtctaatttcttgagttctttgtatatattggacattagccctctatcagatgtaggattggtaacaatcttttcccaatctgttggttgtcattttgtcctatgacagtgtcctttgccttacagaagctttgcaattttatgaagtcctgtttgtcaattattgatcttagagcataaggcatttatgtgcatgtgtttgtgtgtatgtgtttggaagcaatgcttctcccatttcttggagacttttttttttttttggagagcagttgcctagatgttcatcagcaggtgaatagaaaatgtggtgcatacctacagtaggatttattcaacaataaagataagcaaaattacaaattttataggaaaattgatggaacatctctctctgtctctgtctctctctctctctccctggtggtgggcatataaaatgcagtagccacttcagaaaacggtctgacagacatcactcaagagcctcagacaaaaggttgtcatgtgagcaagggagtccactattgcctatatatttctctacgttggtaacagatatagtatgtaaaagtgtttgtagcagtactataacactatgcataggtaaaaaacagctcaatgtctatcaacaaataaggaaaaaaaatgtgctaagtaatatgatggaatagtactcaactgcagaaaagaatgaagtagatgacatagtgatgcagtgtagaacacagataaggatcaacagtattatgctaggctaaaagtcacttatttgttgtctataggatagaacctgaataggtaaatccaaagagagaaatgctagagtagtgtttccaggggctgagagaagactaaactgagtgtagatggattatatgtcttctgctgctgctccttccatgtctggctgacgacagatgttttgacaatggatgagaagctgatgaataatttttttaaaaaaatactgaactttacgttttaaaagggtaactgttatatgagtactctcaattttaaaggaaaaaaagcaatgtttaaaagtgggccaatgttggaagtcaactgtgagaagttaagagcagattcacaaataagcactggaattgggccttgatttgggggaatattaagaatataactagaagacgttgtaagaaaagtttggatgagtcagaaaatagggagaccggctagagagatgtctcagtgtttaagagcactgattgttcttccaaaggtcctgagttcaaggtcccagcaaccacatggtgcctcacgaccatctgtaatgagaaccaatgccctcttctggtgtttctgaaaagagtgacagtgtacttgcataaaataaataaataaataaatctatttaagaaaatagggggacaattgtgtgttagcaaaatacagtagagactagactaaggttcattaaaacacaggccaataaagatgaggccacatgtatgtgttcaggacacatatactgtaatacgtaaaatacattaaaaagttcagacttcttcaggctcgtgaaaaacacactgtgaatgctttaaccctcattgtctgatcgtaacccattcctagtcatctccctttcctttccagctagtttgcatcttacgtccgcgtgtgtacatgtgcagcttctatataggccgccacagctgattcctgtttgtccttttcccaattttttatttggtattttcttcatttacatttcaaatactatcccgaaagtcccctgtacccttccctccccctcctctacccatctactcccacttcttggccctggtgttcacctgtactggggcatataaagtttgcaagaccaaggggcctctcttcccaatgatggccaactaggccatcttctgctgcatatgcagctagtacttggatggaaggccacaactgactcttaaagactgtatgtaacaccaaatattagagcaattgtcttcacttagtagcatttctgagggtttaagtccctttcatttggattctcagtttccatgtgcaatgaatttttttacaggtgagcaagaaaagtatggaaggaagcctaagaaaggccgcaatgagactttaaaaaatgatgccaattttagaacgcatcttctctttcagacttggaaaattaacttttattactgccctatgcaaactaaatttaaaataagctttggattataccccgtgcgtatgagcggacgttatgacattgattgacaacgtcagatctaccctcaaccctctgagagtatgattcacacatacctgggatcagaaaagaagtgttttccagactaggcaagtcactagagctctggtggtactcagggtagatttcttccccataattcctagctaaagatgaaagatacagacaaatgacccatcctaggagaatttacaagggtagtggtaagcaggtaggtttcagaacagctcatgaaacaattctgcagcaggagtcaaggagtcccaaagaagtggcctatatgggacagcaaggagagactcaaaaaaaaaaaaaaaggaggaaaaaaaaaccctatgtggggctcagcagtgaagagcactgagtgctctttcagagatcctgagttcaattcccagcaaccacatggtggctcacaaccatctgtaatgagatctgatgccctcttctggtgtgtctgaagacagctacagtatactcatatacataaatcttttaaaaaaaaagtcctatgtaaaaggcataatggtagatgttgcaagaaagcagtgtgtgtattggtatctggcaggaggctcaggaatgttcacatcacagtcgttaggaaaggaaagcaagggaccccttattgtaggatatatggacaatttaatcatggggtttttttcccccaataataaaattttcagcaggaaaaaaaaataacagtaaacagtaagctacgtgtaacataaggatgaaagatttcaaaacccgtcttttacaaaatgcacagcaacagcttcttttgtgacagcatcatcagtccccgtggtttgcagccggatgtaacaagcccttttgaagagctaagagggcagaaagtttctgttgccaaatatataagagaagcaggaagcacttagcctcggaccaggaagggcatccttgcaggagaccctgcaggtctgtgcagttcattgcccaatgcttcccttaaataaagagccacagacttcaggagtgtgttcccccctgagtgattctgcaagagttgtttgccctccagcactgggctgtgctgaaagagtttagtttcccagggaacaagatctgggtctaaggcaaggcaagcagcatcctatgcccaaaccagtaactccgttttctcagcctgccaatcacattggagcttccagaccatcannnnnnnnnnnnnnnnnnnngcctcaagtctccagtccccatcatgatagtgagacccagaggaaagggaacacctgttgccaccattttgaagggacagtggtgacccataaagagggtgctctaaaggagacaggacaattcaaggacttggataaaatatcaaactgacagtggtgagcaactgtcaggttctaggaccagtttaatcctgactgggcagaggataggggccatccacacaacccctggagggagcgttctatagaaccggctgccttggtcagcttagggcaaccagcattaaggcagcaggaggagggatataacccaggctcacctctcccaacccctacacagggttccttcctgccaaggctctctacacctttagtttacagtggaaatcagaaggcagtaggactcaggtgcagaccatataattcagaacaggaaacaggaaatgtggaagaaggaggggctaagggagagcacaaacattggccagctgcagcccggccccaattgggactgcagacttgggtagatggatggttgccacatcctgctctgagccttttgagtgactctgagatagagcgcctctgtggagttccacagagcaggcacacaggctgaaatcatgaggtttgtattttacctccttgccggtttgcaagtcttgaaagctcactcctctaagctgatggcagccctcatgcaaagcaatctgattgctgtgtctggggttcaatacacacacacacacacacacacacacacacacacacactcaggtgcacgtgcatacacacaaagacagaacagtttgcttgcaacattgtcatagcttagtgaacagtatagcattgttctggctcaagaagccctggttcttcaaagctcctacttagatgaaattatttgcatcacaaacaaaaattgttttgcattttttagataatgaaggatcgtttaaatatataaattaagggctatttagaaaaaataggtgtctttgtgagactggcttaattcacttaccatgatcatattcagttatggtcattttaaatacaaatcatgtgtgttccaatgacgtgagattacagtgaactatctagggaaactaacaggagtggagtagggacaggagaggaagagaaacgatgggtgatgggcacatatgctcaaaaccataatgtactggggctggagagatagctcagcggttaagagcactgactgctcttccagaggttctgagttcaattcccagcaaacacatggtggcccacaaccatctgtaatgggatcggatgcccgcttctggtgtgtctgaagacagtgacagtgtactcacatacataaaataaatgcatctttttttaaaaaatcattatatacttgcatggaaatgaccctatgtaaccgagtttcatttagttgtttttcaattgttagagaaagactaaattttctctaagatagccatatgaagacagttgatcactctatgtcccagaagcccatctggaacttagcattttgagcaaaccataaatttgatgaaatacctcctattcaaggcggcaagcattcatttgcctcacatttctaagtctgcccctgtgactgccttagctccttcttcccaaattctccagttacctggcccttaggggtggtagcgaaatctccttcctgacagcttccttggccaggtgcttctgtgtggagtcagtgcccaggccgccagctgttcaagtgtttgggcatatgcacacacaggaacgacttgggcaacaccctttgccttgtttcgggatgttcttcttgcagacccttgcccagacatagggagtgcctgtgaagtgctccagaataaatcggaatgtcccactgaagccagacaccgtggtcttcatgttaatgtgtaagtagagtagtgatcatttatttattctttgattcccttttgcagagtttttattgccctgtctgagatattggagttttctgctacagtaaatttagcaggatttctccaaggtgactttagcgccagtgaaggacttattgtgcctcttcaagtggttctatcactctgcttgtgctaggggtaaaatgaggtgccaggtggattcaggacaagcagacacaagcaagctaggaaacctggcactcgatcccctctgcggtgcttaggcaagccttctcggctactgaattttgaactttcacaagaacagatcggctgtttgttcaatggtttattactcctgccacaacaacgcatggcatgaggttggcgcggcctgtttatttctttgtgtatatggatatgtgtttgtgggtgtacatgaatgggtggtatgtgtacacacgtgtgcatggggagacatgcccagggctatttaaatcttctgcccttttccttcacttccctcctgttccttcttaagaacaagcattgcttcaccttttcacttaaatttctcctctagaaaaaactgttatcattcaactcaacatgttttccactgaaacttcttccatattaatttttaggttttcatgttctcgttttattcgtacttattggccgctattttcaaattaatagagtccaatgtcatatttctgtatattgcatccctgttgcccatctatgcttctcctccagactatttcttcctgtgcttattcgcttagtgaaagtacattgccaggctagaaaggtggtttgttggctaacagtgttctctgcacaagcctgggaacccgagcttggttcctcatatccaagaaaggagaaaagcaactctgaaagttgtcctctaactttttcatgtgcaccgtagcccatgtgcacccacacccacaaatacacaccacacacacatacacaaaataataataataataattttaaatatatcaactgacttacaaacatttgtttttttttcccgatgacatttgtgatgttaacgcataatttgattctaatttagttgtaagcatattctattttgactctttgaagttttttgaaattcagtatctagctgtggtggtgagctttccacatcaacttatcataaccaagaatcactgggaaagaatatttcagttggaaaaattatttggatcagagtgatctgtggtcaggtccacgagaaaatgtcttggttgctaattggtgttgggggactcactgtgagtagcaccattcactcatcaggggacagtgagctgtccaaggcaagagaaaacgagaagacctcaagcaagcaggccgcatggctatttgttcatgcctgcttgtgactgtagacattatgtgatgagctgccttgagagtctgcttcagtttctcctcagtgacagacggtaacctggaattgtaagacaataaactctttcctcccataagctgctgcttcttggatgctttcttgctacaacagaaattaaaccaaggcatcagcttatattctgcctgagtgcgtatcccaggtgcccagaagtgttggctgttgtactctgcacatttcaatggagtatcagtcaggttatgatgtccttcctaattttttagcaaatgtggtttattttatttttttcaatttttattattaacttttattaattattccattcatttacctctcaaatgatatcccccttcttggttacccctccccagccccatccaccttctgtttattttaattaattaattaattaattaattaaccagtacagaaaaagtccactgaaaaatccatgtcctgggccccaaaatacaaataaaatcaaaaggagtagagtcctgctgctcacatttcttcgtgagtagttataacttccctgagatttttttataccagggtttgtttcctcctggtttctcctcagtgacgtcatcctgaggttagtggttactgtcactgtctctatcctcatcttgactccataatattcttcctctttcgatccagaccctcagggtttaagagtagcttcaagctgagaaaaggtcaattttctccaaaaaagcttccatctcccactgaaaatggccatctcagagtgaagtacactcattctgaaatgtcagggccaattggatggtcatcagaaagcttggcctggttgatatctttatcagcacaaacctgaaaatgcacagtcctccaaagggcggcctctttgtgctcatccgaaagtgatggaaggaaggcaatacaaaaggggctgaactctggtcaccagaagtcagaaaccatgcaaacaaccagtaatgaatagtgaattctagaattcaaattagcagatgttttaaagagacaagctttcaattttcattttaaacatgagcaaaacctgtgttctgaaagaaaagatttagagaagagaaaaagcaaaaagaatatctaacatattgcatgacccaccactcccacaatgtgctcctggtaaacttgaatcacatcttttctccatcccgataattctctaactctcaaggagaggcctgagttaactctctgaaattccatatcttaggcactggatcttcgtgattatcaggatgtgctgtctttatcactttgaagtgaagacaactgctgtcctgatcaatgactttgaatttaacttattctttttccgtcttgctccctaaagcctttggtggacagttttgttccttggttcttgggcttccccttcctaagagttttgtttgcatgtctattcagatgctaaaatattgtgttaacatccatggtgattattttaatgtttgttctttcagtttgggcagtttggcatttgggaattatacgtactttgacactattaaattagatgaatatagaattgtatccttatgatgaataaaccttttataattactaaactcatggtttataaataacaaaactccctgcatcttttgtctttatctgatattaggtgtagctgcatcagctttcttttggctaatgttttgatggtgatatctttttgtattgctttattttcagtctcctactttcttttggattatttaatccatttacagttaatgtacttactggattttaaattttacatctccctctcacaatttcttttacttctataacttatattcttttatattcttcttgactttttaaaaatgttaatcaatgccaatgttttactattctctttgttctatttactgtcccgttaatactgtctactgtgattctccaagtcattacccaaggattatatgttctttctttgacctgttacagtttactttaagttagtctttcttttattttgtatccaccctgggaattcctcctggggaatgatgttatgctagggtacaagctaccattgagtcaccaccctaccctgttaattataatgaataatgtaactaactagcttgcaacagcttaatgtcattgcaaatatttctcagctttccattattattattatatactttcatatatatatatatatatatatgttacaagattgttaaagttacaagatattgttgtattaaatgatcaatgaatgttaaaatttaccaaatatttactctggtttttttttcttattttatttatgtgagtaaattgtagctgtgttcagacacacctaaagaggatagcagattttattacagatggctgtgagccaccatgtgattactgggaattgaactgaggacttctggcacagcagtcagtgctcttaaccactgagccatctctccagccctactctgattatttttattccttctggtgttagtatcatccttctgtgatcatgctttttacttttttatttttcatttagaatcatgttttctgagttttggtaatggcactccactgtgggaatgtgaaatttgggtcattgccatctaaaactcagtcactttggcagcatggctcagttgaatggcctcaaatcccaggacacttatttcattatgtatctgtctctgctccaacaattgtccagagatactgaccagtaacaaatctcccaagacaaaaaagaagaaaaaaaccacccaggccattatcaaaatcacctcacttcattgtttttttcctccaggatcttaactgctcagatcaaatggaccatttaaagagctagaaatgatagatagatagatagatagatagatagatagatagatagatagatagatagatgataataggtagatagatgataggtatagatagataaaagattaatatttgatagataaatagataaaagataggtaggtaggtagagaggtagatagatgataggtaggtaggtaggtaggtagatagatagatagatagatagatagatagatgataggtaggtaggtagagagatagatagatagatgataggtaggtagatagataggtagatagatagatagatagatagatagatagatagatagaagtagttggtggtagcagtgatgataagaagataaaaaagcaactttatgttgccttagaagtagaatttgtcttcccatataaaactatatacaacactgaatctattataaaacatccttgaacattatgtcatgtggacagacaatactctgtatacacaaaaggcaatacattctttatcatctatttaatggtcagtattagtaaccaagtttaatcacaaccttctagataatactactgagatgccaatgactgctttcaatatataagcctgaattatgaacgctctataatgcagccattactttttgaaatttttaatatttttattggatattttctttatttatatttcaaatgttttcccctttccaggtctcccctttggaaactccctatcctaccctccctccccctgcctctatgagggtgctcctccacccacctacccacataccgactccaaccttcccatcctggtattcccttacactggggcatggaagactctcaggcccaagaagggcctctgccacatatgcgactggagcaatgggtcactccatgtgtactctttggttggtggtccagtcccagggagctccaggggttctggccagttgaccctgctgccccccccactccacggggttgcaaaccccccccccccctcagctccttcagtcccttctccaactcctccatctgggacactgcactcagtccaattattgactgtgagcatccgcctctatatttgtcagggtctggcagagcctctcaggagacatatcaggctcctatcagcaagcacttcttggcttcggcaatagtgactgggtttggtggctgcatatgggatggagccccaggtggggcagtctctggatggcctttccttcaatctctgctccaccctttgtctccaaatttcctccggtaatttgttctcccttctaagaagcactgaagcatccacactttgattttccttcttgggcttcatatggtctgttcattttaccttgggtattccaaacttttgggctaatatccacttatcaatgagtacacactatgtgtgttcttttgtggctgagttaccttactcaggatgatattttcaaattccatcaatttgcctgggaatttcatgaagtcattgtttttaatagctagataatattctattgtgtaaatgtaccatattttctgtatccattacttttatgtatcacaacttggatttttttacaggtttaatttaaggatctttaaaaataagatggggttaagattgcaagcctataatcacatgtatctgggaagctgaagctagacagttggaagttcaagaattcctgggatacataattagctcaaggtcagccagagcaactgactgataccttatctcatataaaaagttaaaaagaggtgtggacatgtatatctgtgattgaatgtttcatatcctaggtgcactttccagtactaagaaagagaaagaaagagagaaagaaagaaagagagagagagagggagggaaggatggagggaggaaggaaggaaggaaggaaggaaggaaggaaggaagggagagagaagaagaagaagaagaagaagaagaagaagaaggaggaggaggaggaggaggaggaggaggaggaggaggatgatgaggatgatgaggataacaacaacaacaacaagaacaagaaggaggaggagaaggaggggggaagaggaggnnnnnnnnnnnnnnnnnnnncttatgtctgtacatacgaaatactaaagctttatctaatatttttcttcaagattacaacaagaacattgaacactaatacagagaacatctgcagtgatgtgatttgaggaaaatgaacccaaaggctcacttatccaggcactttgaatcactttcttaactctggccacttaatgaatgtggggaaaaggaaagaagttgagaaaatttgagataagactgttggaaagcaatatgttctatagttattgtcatgaattattttccccaagagtttcttttatggatattgtcctcatataacccaggctcatcacacagggcagtttatccaaagcagagctaactgtggttggaaattttgcaaatattgtaaagtcttgagaagcctaaaacacatacagaacaatgtggaattaacttctgtgaggcaggaccataaagccttgaacaacaattcatatttatttagagaaactaggctaaagcaaagcaaacaaacaaaagaattgactgagggaagtccaaagcgtattttgttccacctcctacctcagccttggtaaacagagctctaaatttctatttacaatgattacataaatattatatggtgacatttctgactgtgaaccaccatacactcaagtatgtaaagaaagtgtacacacaggaatcaatgtgttccaagaagatgcttgaataattgtctaacaaaatttatcccaggagacagactatgccaagttatagtacgaaagttatagtatctgcattgtacaatagcacaggagagagcaatgttactacaccccaagtttttcttttatggtaataataatttgttctttaacatttaaatcatttatgagttgtagattcaaagcatacattgtgatttctcttctgtgttcattacaggacaacactgtcctatttttgtctcctctgttgttattatgtttacataaaaatctttcaagacaaaatagttatgttctacatactctcttgcccttagcttccgtaacttttgccataagaattagtcttttctgcccacactgtagttataccaacatgtgactttgagtaccataactgaacttgaggcatactatattttcaaagggcattatacatttttcagcacagggtattagcccattgggatacagtgaaaaaaaagtctttaaaaacttgctacaggtttgagttgcaatgtatgctttgaatctacaactcataaagaatctaaatgctaaagaacaaattattattaccataaaagaaaaacttttggggtgaagtaatgttgctctctcctgtgctattgtataatgcagagaacttgtaagaaagtgagccacttggtagttcaagaaggatgttagagagaatcttaattatatagctatgtgagtccagaagtgtgtaattagtatattattccatatgtgctcttgagcttttaatttcaagaactgtatgttggaatgattttgccagaggcaagttaatgactgaaggaaggaaggaaggaaggaaggagggaaggaaggaaggaaggaaggaaggaaggaaggaaggggaagaaaggaagatgtgacttactagaagttgatagtagaattctcactggactctaagagtttaaatttattacaggttcttcctcctagcctcatgctcttagaaataagactcagattcaaaatatattttcatatactttggccatgtggctaggctcttctctgactaaaatcataacttaaaaccaacccattgattttcatctacatactgccacataccacatgttacttgtgctatgtgcctgtctcctcacatcttcctgggtggaactcttgtctggctctatcccagaattctttctcctcccagatgtcccacctcccatttcctgcctaagccataggccataagccttttaattgacaggtgatgcacccatacagtacacaagatagtctctctacagctaagttttgacattgtttcctaatgtagaaattattaggagctaatttctgaaaagttttaaaaagttatgtagactgtccattaactaacgtttcagaaaattgtacacagagaactcttatttccttttgcctagtaaattacctctctacataagagcgttaaaccagatatgtatgtcattgataatcactatattttttccgctctttacatccattccattagaaaactttatggctttttggctccattttcaccagtcttactgcctctaatcctaatacctttttgaatggagaactgttagatcttacaggcagttcaaatatccagaaatgagaccaaagtggactataggatgatttccagaagttagatagaaaccaggattccttagaaatttgtaaagccagttcctatttaccaaaaggattcacttctcttgtccctggcacaacggacatagagctccaccgacatgtgcctgtggttgcatttcaaagcccatgccatcctccaggctccttcagcccctactgaaatatacttgttacacatttcaaaggctatgccaacctccccagacatccatcctccttatacctatttgttctcttttcaacatgaatgattttccccttaccctggctattttccctatactttccctctatctcctgctctcctctttactctctcactctatgggctattctacattctctcatagatgcactggccatgtccagtctgctttgattctctctactctctctgattcacaataaaaaccttctcctcacctgtaccatggagaggacatttcaattgtttccttactgtttcccttgcaaaaggaagatcaccccaaaatttggtgccaattcttctactagtaagcaatccataaatattcaattagtgcgtatatagacaaatggacttctcctccaaattaataaaacttaaaatataacaagttaagaaggcatgtaacatgaggagctgtaaagaattcagatagccttctttggtattttaatggaaatctgtgactcaatttacatgtggaagttctagtacacacatgcttcatttagttaaatacgtatacaggtggaagttactatatctcttgccctttgccttgcaaattccactcaatcaatgccaagaactgaactaagaagacatgttcacctctctttcccttcacgttcaatgtgactcagttgtgaccctgaaaggacagtacattccatctgtctcacacctgcctggtgtctgggatccatctctgggattgacagcatctgtgtcctctgatttctactctttagaaaaaaaaaatcaatgcccacatcatattggtaacctttcaaaaagctcaagaagagtgacaagaaagcaaaattgctcccagggagcttcaattgctggtgaaaggctgatccaataagacctcctggcagaaagcacagacattccaggtcattccaaatgcctgtgacaatatgtcagtacactgtctgactgcgtgtgtagtagtgactcttaacatggttatttactaaccacgtgttgccatggaaacaaggtaaagcaacatgctcttgagacacagagacttagcatgttagagaggtggtgcctaaatcccattctacagccagtaggctgttcacacaggcagaccacacccctctaggcctcctattcttccttgggacatgagaaccctgtagccactcatcctcaagacatggtatccgctctcctcttgtatttgagaagcataacattctgaggctaaagggcggagccagccatcttcttgaccggttgggcttacaattatgtacttgacaatctccaacatgtttgaatcagagaggaatacagtaaaattcattcatatgatgctctggtactcctgcttattgaaatagaaaaaacagacatacatacttagactctcaacgtttgcaggaaaagaagttgaaaatatgttcaagagttcagatggcttctttgattcgtggtaagtttgagttctatggatttgggttactcgaactctgattggtctctggagtacatgtagacgttaagatgctatatgctctgagagaacagtgagctgagagggaagcctataaagtagtgacactcagatatagaaacattttcatatgatagtagtaatggtgccagcacttcttccaccaatgtcactgacaagcttcttgttactggaaggagaaaaagtcatcagaccttatgaaaaaaaggtgctaggaatacatgcgcagggattttcttatgtgcaagattcactgagctctttcttatgaccatataacccatctacataaaaatattattaggtgctaaatccacagcaactcaagctttggagccttggaaaattggctttaggaaaagagatcacctggcaagctccatgtctccctttctcacaggatttttggaataggattagggtcaacagtgatttttaagtctcacaaagaaaacaaaaatcgatttcttgcaaaactatcgctgtgcaagtttggttttccagcatagatccgggctgccaagaatgctggctccagctaggtcttcattagccaagtcaggggatagtcagggcattcatccaggtgacctgagccaaccccacccactcagaaaaccaagacaagtttgcctggtagagcaaggggcctcactggctgcaggctgtgactccatgtgtcgtgactgacaccacaaccaggtatgtcatgagaaaaactttgacaagctggatggcagctcgtcgttccttggatttcttccttaactttgctttctgtggctaacaactgccattgaatataaggttatgtaggaagaattttaagtatgccttaagaagttaggattgtgtccttttgtaaaaatgataaccctacagaggtccctttcatagcattaacctgtggtcgtgtaaatgggtactcagccttagagcccatctctttagaaagcaaatcattatgcaatcagacaactttaaagttggaatgaagttaccactatctcaattaggagtaaggggagagtatagtctgtaggagttatgcgacttttgagggtaacacaggtagctgggcatgcaaccaagcatacaatactggctgcgctctcattcaacgtatcaagagtcttctctgatatgtgacacaagcaaatagaaaactcatagcctccaaagaaagatcttagattcatcaggtatgtttgtatgcatatgtgtgcatgtgtgtgtgtgtgtggagagagagagagagagagagagagagacagagagacagagagacagagagacagagagacaaagacattgaggcagaaagagagagatagatgaagcagaaagagagatagagatatagagacacagaaacagagagagacagagagacaaagacaaaggaaatagtaataccttgggtttctggctatatagtctctctctctcaatttcttgtcattgtagcctgaaaacatctaaaaatcacaggaacagggatgactgtgcctcagcaaaactgttaataaatataaaaatgtgaatttacagcagtttcatgtgctatgaaaatttattatgttttgaggggttcttttctacaacataaaacccattcttggctcttagtggaccggattttgcctaggacaatagtttatctggcatagggtaatagaaccagcccaggagagaatgagctgtggactctgtcctccactcgggctctctgaccttgtagctgactccacaagcccccttttccttttcaagggttctgtcaccctacactgtgaaattagtcactgtgtgtctcttcccaaaacattccttatttcttaaagtcagtataattacaaggcttgtttagagcacggtcataaacgtcatagtgaggactggagcaaatgttgctttgaacataactctgtgacttcaactaggtggctatggtaaaaaaggaagtacttccgtttgcccataaacaactgtcttaaggaatttgctacattccttgagtcagctggatctctggacaggcctggttgtttagcttactaacagccaatctttctttccgactggccctgagtatgtgtgtcagtaggacagaaggccctctgggtgagagcaagcaaatgaagaccactgttttaactcagatacaggcggtgggggtaagtctcagccaagacagaaacgcttttccctcagctgtggtgtgagtgtttcctttgcaaactttgttgaaatgttattgatgttgtgatagtgttggtagatttagtgtctaactggtggtgaactgggtcatgaggtctcttgccttatgattgtctgcagtgtggagaatgggtaagttagcatgggaggagttcgccaagaaagggaaggctctctctacatcctttctctggcccctaccctctctgtgtcacataggtttaccttcctttctacaccagatgacacaaagtttgaaaaacttcagaaccattagacaagtaaaaactttcccagtctcccccaggtttctataatagttgataaaattggctatgacttgttttgtttatgttggtgttgtgtttggcatatgttttggttccttgaccctcagacccaaagagagaggtggttttctcaaggccaggataaaggcacaaagactttggctcagagccaccacagaagaactgtgagagagtcccaggagccataatccaggcgtcttccatatatgaagtctccaaaatcaactaatattgcttacactaatattgataccattcaacatgacaacttcttaaaatcactgacagtgatgcagtgtggggcctattaaatatagttatcaaaactttgagttgcaagtggcagaaaccaaatgcaagatgagacatataaggaaacggccacatcagctttaactttggaaccagccataagcatgccactgcttacgcatctcttccctctctgcttttctttgcgttgacatcatgcatcatgtggagagacacacaagctctagccttctgaggcgcttagaatcctgatagctcacagtctcaaaaaggaagagattttatctccacatctatctcagtagacaagattttctgtccttgtttcagacattgctcactgtcagacccaccaatggaatggaaaagaccctttttggggtggatttttagattcccagtgatcagcatggagcaaacaatgggaagttgtgtgtgaaggaagggggggggtagatgcaaggctaaaagcagtgcctgcaccaactgattcctgtatctaataaaaatgtggcttttaaaaacagtaagcatcgtagaacccaccccatgagtgttgaggtgattctggataattctttcctctctcattcctgagccgtcagtcttccctggtgaagacctgaaatagtacaaaagacgatgaatgggttgatactattgtgagagtttggtataaaactcagctctctttttgctcgctacactctttgatttctaccttttgtttctaccaagaatgatataccaaggagacatttactagctgtgaattcctggactgtggagttcacagcacccaaagctgtaggaaaaaaaaatgtattctttagaaactacctagtcctaagtattctgtaaagagagcactaagcaggctgcagtggctgtggctcctgcagagtcttacttccacacagtgacaggggtatgtgcattcatcgtcccctgctcttagaagttggaatgcaaatcccttgaagccagggccagagtcactgttccacaggggactgccttccctcacaatacaggaccatcacttttagcacaacccacaggtcttctgaatactcaaaagcatgaagctaacagacagagccttatatggtgctaaggacagagtcaagtacagtgttagttagacacctataatcccaacacagacacctgaggcttttcctttagaagagatgggaagccaggggtgtggaaaattaaggttttgttcctgctcccttctccactcctcctcctccctcttcttttggtgtttttgctggatactgtgttccatgatgcagtttaaactacccctaaattcaaaatcctcttgcttcagccttcaaagtactagggctattgtcatatactgccattcgccagcctgtcagttcagctgtttgacttttaactggcacataccattatatgtattcattgagtacacatgttatttggaaaggtatagactatagaataactggctctacagtgtattgcctcagttctgtggtaagaatgtcttatattaattgccactgtggttataccatgaacatattcccctcttacaactgaaatcttgttccctgtaatcaacattttcctaccaaccccatagcctggcctgcacactcttagtcctcttgctctatacgagtagtagttttaggttctacatagaaatgaggtcatgtatttgtcttccagtgtctggcttatttcacataacactctggagtcattcttgttatccaagtctttctgtaactgaaaagtatctcactgggcctgtgtaccacatttttattagccatgcagccatgatgaataatcaagctacatttttgatacagcaaatattattgcaaccaacatgggatatctctttgccatattgactttatttatttttttatacacaactagtagtgagatagctgggtgatgtgatgtgtctacttttaggtgtctgaggaaactccatagtgtttttcctagtggttgtactaatttacatttctaccagcaatgtgcaagagtcccttttctcttgtatccttggcaacacttataaattttatcttttcagagtagtggttctagcaatgaggttgtatctcattggcattttgacttccagtttctcaataaacatgatgttaacatttttaaatgcacataataggcacgattgtttttttcttttgagaaatgggcattctattatttatccattttgagccatacccttgttattagattgctttgttctgtatgtattttgagcattaagccctcctctgatgtataattagtaattagaattccttctatcctttcattgttcactggcacattttgaagagatgtgctgtgacctagtgctggctttgaaagcatcaccctgcctgttctattggagacatacagtcttcagaggcacacagagagacaggagagcaatgaggagcttggtgtgatctccagggtaaagacctccatttaggccaggttggtgctctagataaaggtaagaggaagctgcattcgctcatctcatttaaagacagaggaagcaggtttcgccagtttgaactgccaagttgtatggaaagagatgagaaaagtcaaggataccatcaaggctttttgttctgagaaactggagtaaaaataaacatttgtagtttactttgttcttgactcacatgaaagggaagtatatttctgtgacagttaaaataagtacatgggtactttgaagtatggttttaaaactgtcttaaactaaagccatgaacttttattgttctgcctatgcaagcaatgtaaaaaaaatgcatgcatatgtatttttcagaatactaagatatataataatataatacacacacacacacacacacatatatatatagactgtttgcaaaacaatgaattcttttctgtatcattttataaatgattatgtgtccaggaatcagagtaaagctttttggagatgcatgtagcaagggttccttattaatttcataatttaacacattgagctaattggtttgctcacaagggccatagctgttagtcactgtacctttattcaagaggagagcagctaaagctggatggtgcagtaagatgaaccttggtcctgcagtctgtgcatggaactgacccctctcagcatcagactctccagccattcctttcattactttggacctcggtcccacatcttataagtgaaggtaacagaagccagtgtcacagatgcaaaaacagcgtctgcactccaggtgtccccgattactaatgacctccactgggagcagtttagttaaacaaatatttggttccagctgtattctaatttatgtacttgttcatgttcttctttgctataaatgattgctgaccttattaactatggcccttgtgagtgaagattgaaaccaatgagcttaatgtgttaaaactgtgaaattaataaggaacttttgttacatgtgtctccaaaaagctttattctgtttcctgggcacacaacgatctgagcatcagaaatgagcagaataaagctagacactgtaaatctatcattgctcctgagaaaacttaattaaaaatatactccaatgtctttttcatatttgaaaggtacaacctcagattattaatttattatggtattttactttgagacaggatcttatgtagcccaggttggcctggaactcattatgtagccaagagtgatcctgattcacctaccaccaactcacacttgctaggattataggcatatgtctccatgatccatagcagatcctttaaaataatggcaatgaataaataagtatataagcagtgaagaaacaggatgacagtgtgagactagataaccagataaccctaaactctagacactggtatgtctgtgtaccctaaattatttaggcttgtggtgcaagacgtcagaatccttctttcctcagatgagaacattgatgtcttcatgtctaacgtgtctgtttgcattcaatgagattatgaatatctccctgggaactgttggctctattagtagggaatatatattcacatgttttattttaaacattgctgttcagttttggaagactgtagctatttgaagctatccatgcactctattagaagtgggaatttatttttaattatcaattaagaagtcatccattgtatgtgactggctttgaacaaaaaataataataattaaagcacacacacactgtgtagacagacattgttacaatgccagtaaagggaacaaccacagcacatatggcatgaatgttgcttgagacctgagtataatccttaggtcttgagcagaatgagacagctgacttcctgtagccggaagaagaatgagtgcttgctgtgtacaatgctcaggaagggctgacagagacacaggcgagcagcggaggtggggaagacaattacaaaggaagcaacgaaatctgaacaaatcagagactctctagaagataacccaggtctctgtacgaataatcagtctgtcaaccacttcctctacctgctctctctatatatttttattagatattttctttatttatatttcaaatgctaccccaaaaaattccctataccctcccccccccctgccctgctcccctacccacccactcccacttcttggccctggcattcccctgtactgaggcatataaagtttgcaagaccaaggggcctctcttccgagtgatggccgactaggccatcttctgctacatatgcagctagagacaggagctcttgaattggaggactctctgctaattgtcttgtctatacctgatagccacccttcactaagcactctctgaaagtcagactttatatacacaatcttctcctctcacctttagtactatgtcgttatctccatattcaaatgaaggaaactaaagccaaacatttttcctaaaagacaaacagcaagtttatggaagacgtgtaacctaaggctgggattttccaggagcagctcccatgccttcttcaagaccctggcttgcctccattagcaaatgtacacatcacgtgagcatgtagaccccaactggcttctccactgtgtgccccgtcaccttaggagtgagaaagtaatgatacttgcaaacaaagcatccacgtgttacattatctcccacacacactacaaaccacacacactacaaatacttaaaaccagccctcaggcttaattaacaagaagtaaactatacaattttccaaatgatatctggactcatgtacagtgagctcatatattcatttattcccagagctgtataacttcaaaattaaactaattaattccttgtattgtcaagcaaaacattgacaattttttcctgtgaccgcctgttcctagcatgcttgttcttaaatgtgtaatgatataaagtcttaggtgattgtttttgagttgcgttgactttcatgctaattatctgagtgatggacaatgtgttccatctcctaactcacatggcctaatagacgtgtcaatctaacacagtcatggcatgagtgccagctgtttttgaaacatcgatctgtcatctcacaagatgagcctcccaattttccttagtgtacttagtcatgtgtaactaggtcttaaagtaccctaagtttccttgaggcacagacacatgcaattattttcatcgtaagtcttgcctggatgaaataattgaacatgaaaagttgctgcaccccagtgaatccagtttataaaagcgtgtgtgatgaatgagatagggcagattcgagtgatcgttatggagaaaaggccattcagattaagcaaactgactccttcagtgtgtgggtgccacagaaggcattcataccagaaagctggaaatagtaatttttccaccttcccttgatgtttatgatttgtgcatttctccaaaacatcttcctattaggatgaactcagtcacaggatgatagcaaactgcgtgcaccaatgtgtccatgtctctggctactttataacaaaccaccctggacttcatggtgcaaagcaatgatcattttattatactcatgaattatgtaggtcaggaaatcagacacagcccagcagtgactcctctgtctgttgtgtaatgtctagggtctcagctgtgaacagtcaaagacttgggaactcgaatcactcttagtgtctgtcgaggatgatgtcaagaagctgggcttcttggcaaaggcttttttgaacgtatgctttctgcagggctcgcctctgaggcctctgaactctgaagaggaccatgcaagatcacgtgagatcttagagcagatgcacctgaagcatcgtgcacgtgcacataagcgggccttctctagtctaattttggcatccttgcagcaatggttcacctggatcagggaagcacttgacttacttcttaatgggtgaagaacaagaacatgttactagaagtttattcaaattgactggccgtgattactggtcagcaacagctgctgtggaactgttgcaggggcaaaggcagtgtttagggtcacatagtaatttaaatatcacctctcaggtaggacctacatcacttctgcctgcattttaaggcttgtggagccacgcctagattcatcacgcaagggtggtgtcaactgtgtactcagaaggaaaagagaactaccaatattgatgaatggtgatggttatgaccacttaaaaatactgcctccatgatgaaatgtggatgtttctttcaaagctagtttttgtaattatttgaatcagttcatacgtgtcttctgccatccaccaaatatgcttgatgggcaatgcacgtaacataagatgctggatccgggtgtgtatacagcccccatgaaaggcaggaaatcacttgaaatttcggtgtatggccttttcaattatttctgtctttatctcccgcagtcatttactatagtttgcacaccctactgttagtcaaaaccctgatgtcatagtcatcacatcggtacccttttgtaatctgtgatattgtatagagtgtgtagctataattaatatggaattgcaggtagatactattaattgaagtgtcccgattaatttaattatttcttaaatcatttcaaacaagagttatcttacatcaaactctgatagatagaatggttcgttcttactttcatttaaaatgtatatagatattaaaagtacaagtagtggataaatccaggtataaagcagcttatttttcgaaagcagagcctgtggctatacttcaacaataaaaagagctaaaaccagtgtgagacctgctggggaccagtttatatttttgtctataatgagaaaatcatagtaacaaattgtcaaacaatcctgatgccctatgagaaacaatggagaaaaggcaagctctgggacaggctcagaggtgacagggtggatttaatttacttgtagtttgacatcagggatgcatctgtgcatctgtacatgtaacaactttaaatgcccacccttcctttccaccttgctacatctggtactgtagaacactgcatactagctggcctggggactctgaggattcccctgtctctgtatcccatcttgctgtagtaatgctaggattacagactaggaatgtaatcgtgtgtgtttttatgtttggcttctcatgggtcctaggatccattcttcagagttgtaaagcaagggctttgaacattgagccatctcccagccttggggaaatgtcttcacaggtagctctggctatgtagaaaattgctggcaagcttagttaatacaggcactaaattgtgctgcagaatgctccagtgaaactctctatggataacttggtaaaagatcaaggcacttcagttaaacaatttacctaattacctatttaaaggcatctaaaaagagatagaaccaaatgaacccattggaagcatagactagaaatgcagtaatatcatgaacatgtgtttaaataaatgtgtacatggcaaaagccatacagcagcatggctaagcttcttcatcaacatgtattcaaaattatgagaaaacctatctcaaaagttacatgagacaactacttgtccagttttctgtcctggcacatctatgttgaataaaacctgtcagtataggcttatgatcagagtcgtaaatttgctaaaacaggtacctcttccctaggtctgtcaaacatggtcaatcagttacagcttagggcttaaatctcatctaaggctgagtcagaagaagttaacataggttctatcaaaaccacacacaatgctggagataaacattgtaacaatgactttgcctactatgataatgaaatgtcaggtcttttgaggtctcagtcagatgtaaaacagactagatactgattgtgctaacagaaatttactgaggaactcagcatttgtctctcaggaatcttagctacattgtggcagacaatgattatcaggttcatttacttagtgctttgcggtccaaagcacacacctctcatagcccaatgctatatttcttgtaccctcccagaactttgaaggctgtcatggtcactgttctatagtagtgaagagacaatgtgaccaaggcaactattatatgaaagaaatcatttaattgggagcttgcatacagctttataagtttaatccatgattatcatggtgggaagcatggcagcaggcatagcaggcatggtactgaagaagaagttaagaataagtgggcctagcatggacttttgaaacctcaaagcctccctcaagtgacatacttccttcaacaaggccatatcttctaatccttgaagtcttttcaaagagttccactctgtgttgactaagcattcaagtatacgagccaatggaagccattcctattcaaaccaccacaaaggctaatcctctctcaaaaacaaaaaagattatgtatatgtgtacattttcataaatatgtcttacatatttaaaactctgcatgtagatataattctaagacttcctaaacatgcagagggtctataatacactttggctagcttgtgttcaaatgacattttgttgttgttgtttaaagctaggaattgccttcttggaaatatcaaatccctacagaactattaatgaaaaataactatctcttttaaagtaatttttttaaaaaaaaaagcttctcttagaaaagaaagggaactttttctggggtgcatctgtaaaattttcttcagtcctcaaaacagtcctttaccaatgaaaactccagacagcaaaagataaggttgagctcacaggactggtcaaccatagggattctatcacaactctgtgctgcctgcatcaaagccccaagaccctccagcctctcccctcagcctcagttcttgcgcgcgcccgactggccagcagtaacgacgctgtaacaggatccttctgcacacgtttattgggagagcttgattgcagaggcgaagagaccctgagcccagaactggtgctgcttttataggcctaggagaggcgtgtctcatacccggattggttatgcactacgcctcatttgcatgttcctcatctgattggctactctctctctctctctctctctctctctctctctctgtacctcacagagcctcattatcatacctcatttgcatgtctcacatctgattggttatactctcaaagcctcattattatgcccaggccaggcagtgtctttgcaaaaaactttactgcatatgtacacattggttgtttgtccaaacttatgcgtggtggccagcagtagtcagtgccactctgcaacggcacatgnnnnnnnnnnnnnnnnnnnnnnnnnnnnnnnnnnnnnnnnnnnnnnnnnnnnnnnnnnnnnnnnnnnnnnnnnnnnnnnnnnnnnnnnnnnnnnnnnnnnnnnnnnnnnnnnnnnnnnnnnnnnnnnnnnnnnnnnnnnnnnnnnnnnnnnnnnnnnnnnnnnnnnnnnnnnnnnnnnnnnnnnnnnnnnnnnnnnnnnnnnnnnnnnnnnnnnnnnnnnnnnnnnnnnnnnnnnnnnnnnnnnnnnnnnnnnnnnnnnnnnnnnnnnnnnnnnnnnnnnnnnnnnnnnnnnnnnnnnnnnnnnnnnnnnnnnnnnnnnnnnnnnnnnnnnnnnnnnnnnnnnnnnnnnnnnnnnnnnnnnnnnnnnnnnnnnnnnnnnnnnnnnnnnnnnnnnnnnnnnnnnnnnnnnnnnnnnnnnnnnnnnnnnnnnnnnnnnnnnnnnnnnnnnnnnnnnnnnnnnnnnnnnnnnnnnnnnnnnnnnnnnnnnnnnnnnnnnnnnnnnnnnnnnnnnnnnnnnnnnnnnnnnnnnnnnnnnnnnnnnnnnnnnnnnnnnnnnnnnnnnnnnnnnnnnnnnnnnnnnnnnnnnnnnnnnnnnnnnnnnnnnnnnnnnnnnnnnnnatatgtttgcgtgcagcttctacctcatttaaaacttgctaagaccacatgtatctgatctacatatattccctgttatatcacagatgctaggtgtgatatagcacacagttgataccatcccttctcaatagttactgctagccaattcccattgaatgcctatggcaattgactattttgttaatagagttggactctgtcaatcagttgaaaaagtcacttcgtaacttttccactatgctaaaggtcatggcaaagttgtaccaggacttatgaaggttctttgttagtctgttcacagtagcagcactagagaaaatcttatgcagttgttatgaacagttgtacttaaaaatcaaagaaaaactagattaatttgaggaagtctctcttcaccaacagagtttaaatgccctccacattaagtggatgtttttaagttttccatgcaagaattcaagtttctaactctcactggacaagctgtcttattcccaactcttccttaggatcttctttttgattatattaccataaatgtttattcaacatgtgtgatactcatgactacttaccattgagagagtaagtggcagcctagccagtccagggcagccatgtttccttacactgatgagcgatgcccttaatcacctaaattccaaaactattacacttcccatgcagcattgagcatcaaaccattccttataataatacctcagaggtctgggccctttagctccctcagtgacaaagcaatgacactaagcactgtacaggaccgatctggctttcaaactaaaaacaactatagacagtagaaacaatggccatcatcacttttctttcctcttaggtgaaggaaccagaggctgataaaacttaaacccctacaatagaaattaaataaaacaaatttagtgagtcactatggcccaggaaaggcaataagtggttaaaaggtaaactgctgtcacgatgctttcattacacagagattttagggacatgacatgaattttggcacagaaaatcgtgtgtaaatatcacgtgggctatggtgaaaggcttaactatttattttcctacctcagtattaattacctgagtcacatatataagaatgggtgaataaatagatagatagatagatagatagatagatagatagatagatagatagatgagttcttttttgtatagtttataaagaagttcctaactaaaaacaagttccaaagtactgtgctcttttatggactttcaatcagtctgtaaagcttttgtagggcctatcatgagccaggctcggggcagttaggaaaatgcaaatttaataaaggctttggccattaggagcgtgtgtgtctttctaagttacgtctatgcaacaacaatgctgtctgtacagtagagtagagggctcagagaaagcaatggaaattcacagaaagaggtgaaagcccttgtaattcatataccccagagaggaacttaaagagtgtgtttagtaggaataggcacctgccaaagaatctatgaaccccaagatatccaaacttcttatagtcctggaaggagtttcttctgagttggctcagttgtgcactgaccgctgtttcctgctacatcttctcagagcaaataggaaaggaaaaatgcttctgctctgtattgtatgctcctttcattaaatcaccctcgggacaactgagtgttccagaaataggtgttggttaaaaaaaaaaaaaaaaaaaaaaaaaccaaaaaaacaggtatttctgtgcaatcagaaagtgcctctgctttgttaccagcataaagcattcatgaaatcaattttcagcacccactggatagggctgatgtgcgaactagctttgcgtagcccatcgtcttctttccgagatgatttgacaggactggcattttatcatgaatacaaagaggatgagcatattctcctaatatattcattacttccctctccgaactggtaaataatatacatatggtaatttgagagacatagtgttccccattgctcctttttattcctggaactctggctgtctttgtaaatgctgcaaaaatcaaaggcaaaattacctcaaaatttgattttggagtccttctagtctcactttctggtgcccacacaagagctattgcttattttctgttctgacctgtattattcaatagcatcaccccttctgcttgcaatcttattgtagaaccttctagagtgactcaaagaagccatctatttattcattaacaagcacctattaagtacctactctgtcccagacactgtgctaaatgttcaaaagaataaggaccatggaagcctatggcccaggcccattcttgttttctcgagttttgtaatcatttctcacacaattataaaaatccatggcatcgtagaaagataggaaagactgtggagtggatgccgtaaacagaactaaatgaataatgaatgacaagctgagaaaatgtgagtgtttgccagagcatgtgagtctaattagcaggcataaactgatatgctaaaccaaaacgtgatgagattttagatccaaaagagccatttttatagactggacctgaaagaattggatttttagatgggagtatgaaggcagatctgaagggcagttttcttagaactaagtgaaaacgagatgttttactctgcacggacttgattgacttgccatggcttgaacgatcagaatacaagtcaattgtgatcagtaatttcttcacttgtatacttaaaagtgttcattgacctactgcgttagatgaattggtctttgctgaaagcaaaggaaattaaaggtctgctcttcttgaatttgtgttcagatgaatggacaatgggagtaaatcagtgtatggaagccccagctagataggcaccgagacgtaggctgcaaagaagacaaatgggtggaagatgtctctataaatatacatggttgttagggcaaactgaccatgcacattggnnnnnnnnnnnnnnnnnnnnnnnnnnnnnnnnnnnnnnnnnnnnnnnnnnnnnnnnnnnnnnnnnnnnnnnnnnnnnnnnnnnnnnnnnnnnnnnnnnnnnnnnnnnnnnnnnnnnnnnnnnnnnnnnnnnnnnnnnnnnnnnnnnnnnnnnnnnnnnnnnnnnnnnnnnnnnnnnnnnnnnnnnnnnnnnnnnnnnnnnnnnnnnnnnnnnnnnnntcccattccacatcaaatgtgttccatggctgcaatcaagtccatgctcaacagtacatgaagatatgacagtctggtttccatttatataattgttttgttgccttctttattcttactggatgaggtcttattgtgctgtcctgattgacctgaactctgggtttcaacagtcctgataccctcagccttcagagcaaggtgcctcccagttctgccttattttactctctctctctctctctctctctctctctctctctctctctctctctctctttactaactatgaattcacaccaacagtttctagaatctcttttaaagcatacctgataatgatgctgatattggttaaaataatgtaacaaatgcttcttttattactttatatgaattacctgtcatttaatgctctgagatggtgtggggatatagggcgctgttatcgttccattttatagatgagaaaactgagtacacagagataaagtaactcacttatttccataaagcaagtaagtggtgccactagagtataaaatcaaacaacatagttagaaacactatccttatctgtctttagtgtttatttcttcacagctccatcatcttcatagacacacacacaccctacttaaaacctgcatgtccataatttccacaagcaagcaccttgagctgaaacattcggggctgttttaaagtaaattttgctattattcctttggcagaatttaaattgtgaaggagattttcaagtgatttcctctcaggcttcatttagaggcattgaataaagtaatagcacctttgagaatgcaccttgacatcttagtgttgggcacctgtaatgatagcaacgtgggagtctgaagcaggaggatttcgagtggccaggcaggggaaagagagaggggggagagaggaagagagagaagaaagattcctactctggcagactaactgtttctttaactatcactattaaatacactaaattattcttcagctcctccttcactgtggatccatgcctttaaaacaagcaccgttgtcccctttgcctgtgcatcctgagtctctatacacctttagcattctgacccaggattctcaattgattgccactaaaaccccagatatgggtacaaatctgagcaaattgatctcaatatgcattagcataattagaattatctagggatgtcagatcatcttaagcacctacaaagtcctattttgaacacttaagtataattagcatttgtgaaaggtctctggttttcaagtgtcttgcaagactcttgtttttttttttttttttttagtaagcttctaaaagctgcttgtctttaggtgttcagtgaacgggaaagataaacatttgaggcttgcccttttcctctttctgactaaatgcgggtcataaagtagagccacggatacagcaagccccatcacacagatgaacacagatagcccttgccctcatggaagggatcatgtagagtcctctctattccaaaagaacttcacaatctccataactacgtttggcatttcacatctgtcttgtgcttttgtgacatgtggattagcagacagtgcctcgggctctcatgatgaatgtagggtaatacagcagcccagagccatggcacctaagtatgacttggatgtgatcccacttggatatgatccctaagggacaggataaggacactagatcaaatttggatcaaagaagaattggaaatcaaagagttgagaataacacccagccctgcatctgcatctgtttaattagtcttttctccatccattttaaatgtgtcaaaaatgtgtaaagatccattcaaatagaaaaatagtaatttttcatggagtgagggcaggaaataaatgtcagattcccagtagtaaataaatataatttttagacatataattagctttcctcaatctcagtgtcttcatcctaaaagggcttacttttggtaaaggggaaataaacctgaattgttcagttggagtccagtgaaagagcagcaggcaaaagaacatcacagctgctacagatcccactttctcaggaatgaacagctcctttgaatggtgtctacgttatccaaaatgccacaaaacaattgatgataaaactggtggatggacatatagtctgaatgtttctcaaagctcttagtactcaaagaacttaagaaaaggggaataaggaggtttgcctagagtagagtgtttcgggcagaataaagaacccctttatcttcatttattaagttgaacagaacaaataagaagctatccatctctataaaaaatcaaatacagttagttccttaatgagttgcgtcttttgctcctaactgtaatacatacaatagtgtattatttccttttacccagatagatttcctgaaaccataatattcagaggcagagaactaaaggttaatttaaaaaaaaaaaaccctcaggggtaaattattactattagaggagaaagttatatttttaaagcttatagtattatttttccaaattaatttttaaaatagtattttcatgtattcttgaaatgtaagtatattctagattacgtaaataattgataatggactaccaagaaaaaagtatacatgtaatattcaatatacaaattagcttcagtaaatctctcttttgagtcattatttccactaaaatgtctcttacattgaaattattctatgaaatatgaaatttagaatataatggacaccttcttttgttacttaatcatgacgtaacgctttgtctccttttcatatttgaagtgcagaaacgcctttaacatcctaggaaagccatgtggatgtcatgatctggctttctttgttcggataatatactagattattttctttcttctgaacatcttaaactcctagatgagtttttccttcaattttaaatgcttttgaagcaggactcattttgtttcgagcatttcttggaattacatagagttgagtaaatatgaatatgccagcatccttctaaatggactacctttaaactgtttcaaaagtaaaccatgcatcaaaagtcaactcggaagacctgtgttctctcatacccctacacctaccctgccccctgtgggttttttttttcttggtaataacaataagtgtcttagttaggatttctattgctataacaagaacactatgaccaaaagcaacttgggaatgaaagggtagcaataagattacaggtctacatatcacaatatatcactgtaggaagtcagggcaggaactcaaacagtgcaggaacctagaagaatacgctgatgcaggagccatagagaagtgctgctcagtggcatgctccccatggcttgttctacctgccttcttagaacacctaggaccatcagcccagccatcacaccatccacatgggctaggccctcccacatcaatcactaatcaagaaaatgcactacacaaacttgctcatgagcctagctcctgtagacattttctcaattgagaattcatcttcccaaatgaaaatgactctagcttgtgtcaggctgttataaaactcaccagcacatacagcgacccaaaacttcataggtactttgaaataagtgaatctccaatcatgctgctatccttttaagaatttgtaactatccctgcaaactgttgtgggctatgtcatggtctctaaatgccaccctcttacatcctaagcagaatgaagcatgaaataggaactaaggtgtggcacaatgcagacaactttcctctgggctctccttacaggacacttctcagccatgaatcttactggcctctacctttcacataaccagggaaaccaaaacatacatccattttttaatcttgtcctcttccccacacattctcaatcttttctcactgttcctccctcacaaaagagcaagcataggaacaaatgagaaagtttctgactgccattgactctgggaaaatattagtcttgtgctgattgttgcagtgatgtacatataacatgaaatttactatcttaatcatttcaagtgcatggttaagtacaatcacaccattatgacaatccccagtatatttaaatttttatcacacagaactgaaacaccttatctctatgctacactaaccagtcctttcaaaaaattccaagtcgtaagtctaagattaggcaagacatagcctttgtgctcttaaacacttttccaaaatatattcattttaaatttgtatgtataaaaatgaatagctattttagcatacagaattaaatcagtcattttaatgattctactgattggcttccaggagcatctgtgtgtcttctcattaaagtaaccaatgcattacaactgtcattgctctgtgactcttcttctcttgctttgctatttaatgtttctttgaagtcaaagagtagctcttcatgatatgcatccaagtgtgcacttaaatcatagaacttattcttagcaaggaagtatgtagtgaagcacctggtcaaatgggaagacagccttgagaaagacaatgtttttcctgctgaatttctaggaatagccaacaaagtgggagtcctgataggtgagaccagcagtgtgctctttcataacctctttcaattactctcaactcttctttatttttggatcctatgtaaaattttctataaagaaaagaggttatactatgttttgaaacaaaacatcttggatctcgaggaacgttttgtctcattattgagattcattggaagcctgtcattgaatgaaaagatatcattgaaaacatgtggcctttaaaccaaccaccgactctctccaagcctcttttctttatgactagaatgagaataacggtgtatatctgcatcttctaacacctgagaagatttaaaagcagtgagcagtgtgctgccagcctcctcaccctgctgcctaacaaggtccctcccacatgagcagagcaatccaggaagcaggtgacagaggatgaggtagtccagagcagagacaggaatataacagaaactggatctatctggctctggatactagatctaggttggacgtaatgacattgggagctgtgactgatgggttctcaaccagatgccacctttctcagtgtctagaggagtggtatctaacaatgactaagatggtttcccaagagaatttgatactgaaatctcactccctctccctctccttctcccttttccatcccttttcttctccctctccccatcatcctcctccctcttcctccaccttcctttccattcctagtgatcaaattcagagccatccacatgttcgaatattagttaggcgcgctttctagcactgcggtacatcatcagccctggaaagacttattgccatgaatgaatcgttactggcatgtacgtgatcaaggcagagccaccatggtccatgggttctgttaaatacctcactctgaacatgacaaaacctcgatataacaacattaacagcttaacacgtcactcgtgctgaccttgagaaactctacttttagagactttctgacataggtgcctctccccatcattgatttcctcttcgtctggtaacctggaaattcttcaggttacttttgttctggttctcttctttgttcctttgtccctctcttcatcccttcttcataactttttcctttcactgacttcactaagacaagattcttttgttttcttcactaactagtaaattgcttctttcccaactcttactcttaaaagcaacagaatagagctctctaagggaaaataacataaagcttgaaaccacataaaactgcatttgtatttgtgtagacatgcatggattgttctttaggccagtagattcagagacaaaaacaaacaaaaaccatcccccagtgttacagatagttagggggactggactgtgtaacatcaatcccaagaaataccttaagtaagtactcccaggttctttagaatgaaaaatctaggaggtgtcttagttctattgctgagaagagacactataaccaaggcaagtcttatttaaaaaaaaaaagcatttaattggggctggctcacagtttcagaggtttagtccatccattatcatcatgacagaaagcactcaggcagacacgatactggagaagtaactcagagttctacatctagatcctgcatgcagcagggagagagacacaggacctggcttgggcttttaaaacgccaaaccacaccctcagtgattaattttctccaaccaggctatacctactccaaccaggccacacctactccaacaaggccacacctactccaacaaagccacatgtcctaatgctactccctaagcattcaagcatatgatcctatgggagatgttcttatccaaaccatcagagatggtatcagatgccctataaaggagtagggctttcaggccaaacttactttgaaaggttctcaaatgattatgagacacaacgggtttgggcaacataaacaggttgtttttataaatttcaaccactggcttgctatcttatcactcaaccttttaccaatgagcagatttcaaccaaaacaacatttttttttgattagttgagtgaaatctcaattcattgcatctcaatttattgtcagactttaaatcaagtgggcaattatttattcccatcaaggcagccttttgctatcctgtagccaaaataataaatactggttgttagttttatattcaaccttgttcctcagtgttttaaattattctgatacagctttggatggagagtgaataaaaagaggcatggtctctggagccccagatcttctcataaagacccaagaataaagtggtctaaacaacccttacacacttgctcactcactcaacaactctttggaaaactcacccaatcccagctccgtctcttgatttactctttattctcatgactgaagaactcagctgtttatgttttaataaaaaatggtttaaaagaccaagcagaatccaatggggactgtttctgagatatccagcttactggcatattctaatgtctacttggcaataactgaaagtgtggcctttgtattccaagtaactctgtctttgagtagtttgcagatttatcacttgttggtctacagcctttaagttagggatcatatccaaagctgcctggttttataggaaaagcctagttgtttccaaaagcaaggccaattaatagagcattcgagatatttgagatctatttccatggaggaaatgatcttaaagtgaagttaattaggagtgcagagagccagagatgataaattcagaattgcataatagatttgtatactaaaggggcctgtgtcatctccagtcctaaagagaccggctgctgaagaatgagactcagaaaaatgggtgggttatatcgcctccagctttccatgtcacatgcacatgtcacatggcctttcatgacctatattaaagttctccagagaaagagaaccagtgggttattctgtaaatatgtgtgtaggtttatatatgcatgtatatataaatgaagggagatttttttatggcaagggattgaagtgatgatattaagtttaaattcaatctggagacctaggaatgacaatgatgtaactcattctacatctcaactgagagattcctggtggtataacttttacttagaggccaaaacctaaggtacagagtagagactgggggagtctagtgacctgaaaaccaagagctctcatgtccagagtcaggacaaaatgaatctcacatccaccagacttttagtttttctgttctgactcttaaaggattggatagtactcacctaaaacaacaacaaaaaagaaaaaagaagagaaaagaaaacaggaaaaaccattctccttttgagtcaaactctattctcttccagtaatactgtcagagatacatcagaaatagtatcttaccagctatcaaagtaccttttaccctagtcaagcagactaggctacacaaaattgaagcctttatgtccctgtccatagaagacaggcttagctggataatacccaagtcctctattatagcatcttgccagctatcaaagtgcctcttagcctatcaagcagtctgggccatgcaaaaatcacgaagcctcagtatccccatctgcaggagacaggcttagctgaataacacctaagttctcaattatataccagtgctctatgaatgcaaaaataaggcttggaacactctgccttgaccagtttaagcatcaacagaagctgatcgctggacatgccttcaatcacaacttacacattaacttattaaatttactagctaattccaatttgttttctattttgaatggcaaaaattttcaactgggtctctacttgattttatcaagaaattgatggttctgtttggtataaaagtattttggttctttttccagaatatggtcatcattactagagatataaattgagctaaataggagtaaagtatcatgtctgtgatttcatttaaaaataaagataaaataaaatgtggctagatcacataagatgctgtttgggctggcaacatttctcattaaaaactatattctgaaaaaaggtatcagggacctaggggagacagatatgggtaacattgactgttctgggcgtggaggttcaatttatttatttgccttttcaccctctgtagtgtgtgtgtgagtgagtgtgtgtgtgtgtgtgtgtgtgtgtgtgtgtgtgtgtgtgtgtgtgtgttagtgaagtggaatcaatttcctgaagccttgagagatttaaatctcttcactgagagtgtctcttcaactgcatgcaagcatgaatgaatattaagggtaaggtactatgactgccctcttggttcatctttccattgctactgcacaagtcccagaattttgaatatcgttgggtcaccatttgtcctataggcttctgtaacctccttaatcatttgtatataatctagtgtgtgttcattacacagattcaaagcttatgttggagtgtatctgtagatagattgggctttctcatattcttccctctaccctccttgttttatatcctcacaacatcttttcttttcctttttttgtttgtttcttgtttgtacatatgaatttaaaactgtgaatttatctgtctttctatatctggcttgttttgcttgacaccatgacctgtgtttccatccattttcctgaaaatgataatacttaaatttttatggctgaattaaactccattgtggatttattctatgcttttatcaatttacctattgaaaagtacttatactgcttttataactcggctattccttaatcatttttctaattctttctaatagacatcctattaaataaaactgaacaaggtattgtaccaatgaactcagaacacatttactggctttacatagaacattacaacttttcctttggaaggaaaatagatgctgccctcgagtagggtgcacactatgttcatatcaattaacattggtgaaaacattacaattcaattggtccatcagtaagtcagagttgtctatagaacacatgtttataaccctatatcccgctctgatagaaataaccggttagcttcttaaggttgatatagtaaagttgccacaattaggtggcttaaaaaaacagaaacttattttctccaggttccagagtcgaacaacttagaatctaggtttatttggtactgtgctccaattgaaaccctagatagaacccattcttgtttctcctgaacttttcatgagaaccaactgccttgtcatttctcagctgaaagctgcatcctccaatcttcatcttcatatgtgatctctcctgtgtctatgacttataagcacaccatgagattaagggcacaccctatttcaggatgacttcatctctactcattacactttttccaaacaaggctgtgttctgaacatagaagggcttcaccatctctttttggaagaagcaactcaaaccacgaggccatccaaacaaatgacactgtgagatggattccatttgaatcttttatcatagctatagttcctaattttacaaaaatgaagggctaaagtttacttcctgccatgcctgggaaataatattcagacaacatgttccaggacaatgtctaggatctttagaaacacatactctgtgctatatggctgttctacagaagccacctgagagtcacaatagagacatcggatgtaagcttcttctgaaaagaattaatgatgcttctatagcttgcccttgttataccacgcccactcctacctaaagtccttccactccatctgaatcactgaaagctttaaatctaactgtgttgatgctgcagcaggaaagccacaaaccaaatcaggacaaaccaacaacccaatcagaagtattttatacaattattatgttggaggttgtggtcttttcttacttgagtttttctgcaatgagggagaaatagtgaggaccttttgtatctctaggtaaatattaaatctgccagaagagccagttacccaacaggtagtcagctcacaggtcagtgctcattggaagatgttcagagccagaaaccaatcccagcagggatcctatgcaaatctagcaagaccttggctttcatcttctatttcctgaaacaagcacccaagtgttaactggcttgtgaaataccttgggtaagtctcttgtgtgtttaagattctggctgatttacatctgccaaaaaggggtatttgttatttcttgatgaggcccaggccctctgcactaacatgtatgttttcgattttcattcccaacctgatgcttgacactctacatgctttctagggtgaatgaaagaaactgagaatcaggtttctctgtcattagcacagaatcagctaagaaagaactaggataaagatggaagaaggggaaatgaatatcataagactaaggaaaaacctttaatatgaattacaatgattaaggattagcattagaaagtatgtgggtttgacaaagctactggaatctttttagactttagagctctcacctttcttgaagtcacttgagtttgccatcttgagatcttgactattatgtaaaacctctaactgtgttaggtcaaacaagagtgtaagaggtgtgagaaggttgcatgattgcttgtgactcttttgttgccagctaatgtatgagtgtggaaccagagcagagaatagaatgaatggaacaatcaccatatttgctgaataaatgtctttgtccattttttgttgccattcctgtactttatgaagcaaattagttcacttcctacaagtctggacatgggaagtccaaagctgaaaggcagcatatggtgagaactatcccactagtaaagatgccctgagaacccccaagccccaagtcagcacaggacagcatatgtcagaacaaccacgctgacttgtgtgtctcttcctcagattacgaatccactactcattatgcagacatccctctcatacctcatcgactcttaattattcccaaaggtccaagctccaatcaacactaacaggtggtttgtgggttatgagaggacaaacacgggaagaacctagtgaggcatttcaaccccaaggatgaagttggccatcaccctggtttcttcaataaactgagcaaatgagtaacagtaagaaaggaatagtaccctgatgcctaaagtctcaacaccagcatctagaaaggagtgcacacgaccccaccccttatcttccttgccagtttctgctttttattcagtaaccattgaccctgccaccattcatcaccagaagtcacagagttgcaaggttatgtcctcagtcaactcagctttgatttgtccccttgggtcctcacttagtaaagaaaagagaacaaggcaatactggtaataaccaaaactgaggcagatatggtttggcttgagaggtggacttgataagaggagaaccatttatcacttggatgccaacttctcatttgtcaaatgtttgatgggtttagtcatgaagtctccaggccaggaggactacatgttaaatagcttcttacttattgtcatctattcaaaacaggtcggctaagcatggacaatgggtgttacgatatcttcaagtaagctgtagactgacaggctagttcattttttactatctattgttataaattcatggatttttggggggacattctcattgtgcccatcaaatgccttgatcccactcatgctcatgctactctgctacccaccgcagcctcttttcttggtctgtattgtcttccctaatgcagccttttagaaaataccttcattgtgataaagtgtacatgcttaaagctcatgtttaaaatgtatacttcagtgggttttatgtagatacagagttataaaactgtcataacaatctaattttagcacatatcaccaagttaaaatgtgtatgttagcaggcatagctcatccccctactctctccactcccgttagcatacaatactcagtctgtggcaatctctaagtcactttgctttgctattgcaattttttcataagttcctaccactgcctagatcataaaatatttcccctatatttttctacagtaaattgaacattgaagttacatattaaagtcttgatccattttgaattgattttttttttttttcgagacagggtttctctctgtagccctggctgtcctggaactcactctgtagaccaggctggccttgaaatccgcctgcctctgcctcccaagtgctgggattaaaggcatgcgccaccactgccctgttttgaattgattttttgcaaaatgggagatacagatttaatttcattcttcacaatgtaaataccagttttgccagcacaatttattaggaaggctgtctttttattgccagctttgtcaaagattagatgactggagctgtgtgggttgatctcaggtccttaatttcactggtctataggcttgttcagtactttgctatgatatcaatagcaaaagtaaattctattagtgtttatgaagagtgagtgtttatgaagagtgagtgtttgcaatattccttaatggtaacagcatgaataagattccgatgtctatatctgtggttttcaactatcttaatcgacggcacttaaatgatcctttgcttcccattgtaataaaacatatctaaaatgtacagatgagtttggttttgtttatgtgggatccaactcctgactttgtgtgctcagctgacgtgtctgtaacggaatgttctgccagtctccagtgctgtctaccaggaccagctagccacctaatgctgtctgtaattttaacttcatcttctcacaggctgagtataaatgaggagacacagtaggagatatacggagcaaagaggcttttaaaggtcttaggattcttccagaatcactattcaggatggtcttccttaagaatggcaaaaccctgcatgtttatcatttgtatgtggacagttcaaagttcaggaggcctcttgtggatgtttcttgtcttcggagtattaaataatacttaactgtcttctgttctcatcatcgaatgaatatgactttgttcttatttcctaggactatgctgtcagtgattatgaataagatcattaatgtgtattcgttacttcagtttcttgtgtattgtgtaccaaaaagaaagaacaacaacccaaaaagttggttagaattagagactactgccttgtcataaagatgtacatgctatatttatacaactttcagatggagcccctctgttggcccatgctgactacatataacacatcaggttcgtcagcatcttattcctgggatacaactacaacaacatgctcaaagaaaaagaaaccttggtttttttgttttttgggtttctttctttttttcataaaagtgattgagtgagttgtatcattaagcaatgatgtcactagaactcataaggggaaatcagaaaggcgaacctggaaacgtctcgaagtaaaaaccaggaacccccagcacagtgagtgcacggactcattgctgtcagctgaggaattgctcttgtgtccctgctactggagctctgacttggtgatgtaagatggccatccccctcaccactcatccatcagcagcacttttaaatttaccttggaaacaaaagagcaaactgaagtacagtgcgtgtcatatgatgagttcaactacctcttcgaaaggcaacatcagagagtgagatcaacaactagactaagaaggagaagtcactgttgttgacacaagctattaatttactgctctgaaatgatcgttaactgttttgctccaagagagagaaatctgttcaagggacagagagaaatattgtttagatggtccctaatgagacagaagtagtagggaaatagaaatggatttccccactagcactgctccctaaacaggctcccttattaaccagcataaaggatggaaacattttggctacataaccctacataatcctaacccttggatactaagacgagaaagtatttactctctgatacttccaggtaaagaggggatgttctcagttcagatcaccagaaccataacggttctcttagttaattagaagagtatgttctctcctggtgtacggcatttagtgacttccaacttttaaaaatgtaactttttataaacctcctcgcgaggatttaaagaacaggacacaggtgacatttaagaatgattttaatactgcaatcaatgaggaattaattttcttcgaggtgagagtttcctgcgtctggaaacggaatctagtccttcacacccactaagcttgcactggagcacagacctgtagtctcagcctcacatatttaaaaaaaaaaaaaaacaattccggattttatgtggaggtccttgatccacttggacttaagctttgtacaaagaaataagaatggattgatttgcattcttctacatgctaaccaccagttgaaaatgctatctttttttccactggatagttttagcttctttgtcaaagatcacgtgaccaaagtgtgtgggttcattttggggtcttcaattctattccattgatctacctgcctatctctgcaccagtaccatgcagtttttatcactattgctctgtaatacagcttaaggtcagggatggtgattccccagaagtttttttattgttgagaatagtttttgctatcctgggttttttgttattccaattaatttgcaaattgctctgtctaactctatgaagaattgagttagaattttaatgtgtgagtctcagcctcacaaattttttaaaaaacaattcctagagttttctagaatatatatatatatatttatcacttagatgctaggtttttttctttttttttcttttttttattagatatttatttcatttacatttccaatgctatcccaaaagtcccccacccgctcccccacccacccacttccacttcttggccctggcaagtctgttttgttctttctggtttttctgctctcttcatattagtagcatggccctggtttgcgaatgctccacacttgacctgagaagtggacttacactggtctcttagctaaaataaacagaaagccattccgttcgggtccactgctggtggtcacctcattaccatgcccaaaccatggccactccagttaagatgatcactggccaacttccaaagaaccacatttgtgctgcagttattcattggactggaacaacctcctccccgccccacccccacccccacctctctctctctctctctctctctacctctctctctctctctctgattttaaattgtttgtatagctactttcttgcttacaaaatccaactctgaattgtaatattccatgttggtcaatcaaggctccctgttttgtttgtttgtttgtttgttttatatcatcagtagtactctctatttattttatatcattctcaaaaatatttaaagtaactcgcttccaatatgtctgtaataaccaataccagaactgtaaataggttatgacaataagaaaacatataacccttttggtatttccctgttacagagcacatacatccctccattagagtcactaccctttgagaataccaacctttctagatgctcctggtaaagctagcatgtgggaaacattgctcaaaaatgccagggtacctctgataaaacacaggctggtaagactttcttgagtagcagtgtgatagtctacctgtgttctcaactttggtttccaaagaaattcccatcataatctagtgaaactcctagcagtggagggtatggagcctgaagttgcctcttcctctagccaggtagaactcccagtgaagggattaggataacccacccacaaaaccttgggcccaaaatttatcctgcctataagaagtgcagggacaaagatggagcagagactgagggaattctcaaccaacgactggctggcttgaaatccattccgtgggcaaaaaccaatccctgatactactaatggtcagaacctgttatgcttgcagacaggaacctagcatggctgtcctctgaaaggctccacctagtgctgactgaaacggatgcagagacccagagccaaaagttagaactgaggaatcttatggaagagttgggggagaaactaagggcctcgaagggaataggaactccacaggaagacaacagagtcaactaacctggaccctcaggggctcccagagaattaatcaccaaccaatgagcaagcttgggttgcacctaggtcccctgaacatccttagcaggtgtgcagcttggtcttcatgagagtcttccatcaactaaaacaggggctgtctttgtctctgttgcctatctgttgatcctgtttccctagctggctgccttgtatggcctcattggaggagagaatgtgccttgtcctgaaatggtttgatgtgtcaggtgggcctcactgttctcagaggagaaggggacagaggaaggaggggaggagctgtgtgaggaaggtcagggagaaagggctgggatcagaatgtaaagggaataaataaataaattagtggaaaaatgtttatcaagaatagtgtacacagccacaattaaaaaaaaaaagagccatgaatttaaaaaagcaatggggttatgtgatagggattgaaggaaggaaaagggaggaagaaatgtaatcatagtataattataaaatgctctaaaatttatttaaatgtaaaaaaaacagtaggggaaatcaaaagtgtcaaaagcagaaggagagatgggcatgttgtcatgaatccatacaaagaataggagacatatgaattcaagaatttaggttggatgtgagtagttggaaagaaccatgaattttccccagcagattattgcaaaaatatccaaacattggagcaaaagttctaagtgcagattaaattgtaagtttctccaatattctagaaccagagtattccaaatactgccttcttatgagttctgtttatccaacccaagtaagatccgtgcatctttgcaaagttcttgtcacatctatagtgacaatgagcatacttttatcagaatggcccttatcttcctgggttgccataatgattagaaagttattctgctcagttaaaaatttattctagttctggccagtaacagaaaagtagaaagtccagcaagatgtttcattaaagtttactcaacccaagttggctgccacataatttccactggtttgagaagacagtaatttgggtggatccttgaaagctcaaattttggataattaattctcagggtgtctgtgttggaaagcaaagggtagagtctaacaagaagcaactaggtcatcactcatgaaagctttcttagaaaagcaagttctgcctgcattattgtccactctctggtgtgagccctctcctctttcttgttttctctgatatgcagtaagttgaacttcctctttctacctttgggtgataaagccatagggctctcaccagctgtgagaaagagtattttatccttggacttcccagtctctagaactataaaatataaggcagggggtccactctgttctctcaggcctttgaatatattttcttggtggccatggccattttgaatgaactcaggacaacacatagagttcttgagaagaacatgttgtcttcctacctttggctcccccttgtcttctatgttttcttcatcttttccttttcctctgacaagttgcatctagctctcataattctttaatataacattttaattttaaaaactgtttggaagaactcatacattagtcctgtatttacatctcctttctctccctcaatccttcctccatctgaggtccattacctcttcttctataattatagttacacaaaattgtgtttgtatacaacctcctgagttcgtttagtgtttcttttatgtacatatgtttaggtcttggtagttgggattggataacctattacagaacaccttgctggggaagtctgactttccctacacagccattgactgtgtatagttcttcatctagagatggagccttgtgaaatttttcctacccacattggcatgtagactgaccttgtcattatctagaccttatttagatagccacactgttgatgtttcatgagagcagcatccctggcatgtctagaagatactatctagcagcaggtattttggtcttctggctcatacaatcattccatctcatctgcaataatcaaacctcaggtctaaagattgtattgtagatgtgccagttggggctgaacacctcacagtcactcatcactgaattttgaccaactgtggatccctgtaatagcctcttggatggcatctttgatgagggttgagagctagctacacttgtctgtgagtataaaacaacacaaaccattgtcatgacccttggttgccttgattgcctccaagaacttgaaggtaagaccctacttcttaagtccaaacatacttcagatgaggatatggtggcatcaagctgggactgacctgaatgccccatttctgaggacaaactctcatagtactagaagtaatatgcaaattgctaaggaagaaaagaaataaatattccttcccagctagaaggcctataaaccacagcaatgaccagcctgccaagggacctacagtggggtaatagtgaaactattatcttggagtcatcaacagccatctaattagacttaaagtccacttactagaaggaaactcatacctgatactggaagcctaatgaacacatggctagacctcataagagaacctactatgattttttttctaaatcaataaattatataattattttctaagtgaataattactttattagttctttaagaatatcaaacatgcacaccatatatcatgtcattcctccctcttccccttaacactgtggttctcaacctgagggtcaaatgactctttcaaaggggtcacctaagaccactggaaaatgtgactatttactgtatgaaccataacagaagcaaaattacaattgttaagtaacaacagaaataactttatgattgggggtcacaacaacaggaggaattgttttaaggttcacagcattaggaaggttgagacccactgtcttaaccctcacagttctactcatccactccccatccactttcaacttcaagttcaccttttacttttataacccaactaatgcaatttctgccgcccatgtactcaaggggagagaccatacactgaagcatgctccacctatcaaaggccacacctttaataaaaaccggctgtccttgaccccgcagccagaaactatgaatagctcttcaggctgtgatgggagttcatgaaccctgctctttgctggaatgctgaccagctggatcttaaagcacatctctgagctgctgggagctcaggagtggggtggtcatgtcttctccagaaggcactgtttttctctggtcttccttgacctctggcccttacaatccttctttgctggttcctggaactgggagaagcatatagctgctgcttttaaaactctaaaaggcaagaaaattcagttaaaaacaatggagaactttggttgaagccaggataggtttatttctgcctctacagaatcataaaacatcatacacctgacaggagtgggaatgtgtaattgaagacggcgagtaactatttatcataagctaaaatttaatataaagctactcaatgctttaatatcccatcctaaagggctaagcactatgtagtgctagatccttgagtagagaacaataaacagagaagacagttgacgtacatgagaatcctcagatattacccaaatacgtttcagataatcaataactgttggctgagtgaatatgtacatgaacaaatgagcaacctactagagctcattttccatgatgactttttacagtttttctccaatatgttacgtacattttaatcattttttaaaattaactctctattaagaagcttggtacttatgaagattagacaaaatcgtgtgttcaagtgctcatgctcagaaatagcgtctggcagtcaacaaatgttaactagtgattttcttcttttttctagttattctttaaaaataggattatgctgatgccctcaggctcactaatctcaaagtcatttccctaatccactaatgaaaagagatctggagttgcaatcagttcctactctgtgcctttaactaggccacccacaccaaccccttggtgctggcaccaataaaatatatgcaaaatcctaaatattttttcacttcttcctctgtactgtttagttagccccaaactttgggccaaatctaccatgtccagtcagcacttgtctactccctgttggacctgatgtctgaactgaatttacctcatttgattctgttctttctccttctctcttaatcagcccagtgaaggttttgtaatttccttttggttccaacaaggctcactccattaacccaagttttgggatttgcctctgccacatatggatcaaaatttccaaactgcagttggcatgagtgttgaaacttatccctcaaaactaggagataggtctgatgttctttgtgtttctgtatttcaggaacagaaggggggaaaaagaatttcaccaagctcagatttccttcttttatttctctgttagtgctctatgtgactggctgccccactgaatctgttggctctgcctcagtctgtggttctcagacccagctactcaccaagattatgccacaaatgatttcttggatgcatgtatgtgttcttccttcaagggcttgtgttttcaggttgctatgagtgactagacctgttgccagaatgcatgaatcctctctgattttctgagtatatccgaaaatttattgagctaatatcaatagataaggcacagctttggtaaattcatcagttacaatgacaccagcagctctggatagacaagaaatacttgctgtctttttcacctctgactagtgggagcttgccatgcagaatctcgtctgttagttacataaagaccaaaactgtgagctctgtgctcctgaaaagataaaattctggacttgcttgcttcatgacacactatgcagaccgtgtctccttttatattgagaggcaaaatattgaacataggactccatgtggaacctaataaaggcactaacaaaattacactttccactctgtgttttatgccatactcctaacattgtggccaaactggtcttcaacgcttttactcaatttactcaagtgtgtgggtgggggtggggggggtcattgtttcctgaatggttgaattttaaaaacaaatttactcaatgtattttatcatatttctccctccccattcctcccaataaccctctttcctaaccaacctacttcacttttttcttgcttaaaaaaaaaaaaaaaaaggtacattttgtgtggtccacctcttcctgagcatggggccttccctggactgtggtcgatatgcccagtgtcattgcattcatcgaaaagaagtgatgtttcctttccctcaatgactgtcatttgcaaatattgttttcgtgtgggtggtacactgtacccatttttctttccccatacactgattttgtcctgttcgaacttgaggtcttgtgcgtgctagcaccatctctgtgaatagccatgagcatcagtcctgttatgtctgagaaacgctgtttccttgaagtcgcccaccacctctggcttttaaattctgcctctacatcaattcctgagccttgaggagagaggtgttatgcagagattccatttaggactgagtgctttaatatttctcactttctgcaggttgtccacttgcgggtctctgagttaattgccatctactgaaagaagttctctgatgagagttctgtaatacagtgagctgtggatataacagtcatttattttgttagaggagttattctgttgctatgttcatttaggctttcccctaggcccatcatctagtcacagcttttgaacctcattaacagtgctgacatgtgttccatctcatagagtaacccagaaaccttaccaaacgagtagttggttacgccaatagcacctatgctactattgcatcactgagtgtatcttgaagacagattgctactacagctctcagggaacatagctggatgagacttaaaactgcttttcttctccagtagcttgtattatatcatcacccagcacgatgaatgctagtcgtaataggtcaaacttctagttgagtaccaggttggtttctccatgttcaataccataagtgtgtggtgtcttcagtaataatctcttagcatcatattgtggtaggtactcaatatcattggcaatactttgtaatatttaagggtggtctgtggaactgtttttgccaatgactcaaaaagatataaccactcccaggtataggttttatggtaacatatgatgtccagttgagacattgtctcccccatcctatgataactccatttaaattccatttatatacgcatatattttaggaagcatctacaggaataggcttctgtatggcttttcaaaagacctttagggtaagttgtcccttcccatggtcccttctctactctgtccacctatcaccctctccatttaatcctcctattctaatttcccttttattgtgtggtaacaatatagttatttcccattcatggtccctagaagatcacctcctccttcatcctagctctctactttctgtttaaccttggttattctgatattgaaacacatatatctaaaagctaacactggcatatgagggaaaacattcaatatttgtctttctgagtctcagttccatcactctgggtgattgtttctagggccatccatttgcctgcagatttaataatttcatttttcttgaaagccagataaaattttattgtataaatgtacctcatttacattatccaatttaccagacggtagacttcaaggccttttccaatttctggccattatgaatagaacagctatgagcagggggcccttttgtatatgaacaagagttttatagatggatcttgagatagatcaatttttggcttttgaaggaacttccgtactgacttccatggtggctatataaatttgcactccttccacaatgaataagtgttcttctttctccacatccttgccagcatctgctgccgtttgttttatttatcttgcccatcttgactggaataagatgaattctcaaagtagtttttatctgcatttctctagtgattaaatatattggaaaatcttgtttctcactcagttgtgtattatcttttgagaactctacttctgtatcccatgttttaattgggatatttgctttattaatgttgagggtttttttttttttacttctttgtatattgtagatacttatcctctgtaagatagataattagtaaagattttttcctattctgtagctgatgctttactcaaataatgttgtctagcatgtagaaactttttaacttcatgaggttccacctattaactgttggttttaaaccttgtgctatccagatccagggccagaaagtcttttcctgtgtcaatgagttcaagcctattccttaagttctcttctgtcattttcactgtattttgtcttatgttgacgcctttggtccatttggagctgagttttgtgcagagcaatagatatagatataggtctgtttttttttcttcagcatgtagtttgtatgcagtttgactagatgctgtctttttccagtgtgtgtttttaggcttctttgtaaaaaaaaaaaaataagaagaaagagggaaaagaaaaagaaaagcttttcatggtgtgtatatttattcgtgcattttcaatgtctctgattttatgccaatgctatgctatttttattgctgtagttctgtaattaatatgaaatctagagaacctacaaaaaatgaacatatatgtgcatgacataccaaacttaaatcaagattaataaaacaacttaaacagactcataacccttagtgaaatgcaagagtaattaaaaatctcccacgtaaatgaactccaatgccaaatggattcagtgtagaattctaccagaccttcaatgaagaactaacaccaatactcctcaaattattccatgaaacagaaactgagggaaatttctcaatgctgtttctatcaggatcatacagtcacagataagcttgtcttttaagagagagcaatgaatgagactatgcagtgttattgtgggcagggctgagaaataagaaatctgtcacaactcatcaacgtgaaaaagaaatgaacaagaatgaatttctctggggctcagtgaaaggctgaaccatggaggaataatatggctggagagacagaccaccactaaaactaagtcacaggaaaggtagttgtggaaggaaagagggcccttgcatgcccatttcccattctctacctcatgccccatgcctctacctctgcctccatctccagaaggttgattcttccagaagtcactcttctgaaaggcaagagagcctagcagtcagaaccatcaaacccagaacagaaaaagaataagcatggaatcaaggattgaccgggattaagtggcatgccagtcatctgatacatattgaatgaataatagaggtgcaaatgatgagagcccaagacccagcatgcagtaaaggctttagcggctgctgaaactacaattcccttgctgtctctgtgctccgagtctctcgtcagtactgtgtggtatttcagactgtccacttcagtgcagcctctgacctgtgtcttgttgcctctgtgactttctccaccctcagctaatacctcttcatttccaacaagaatagagagtgttgatgggaacagggaggagcatgggttgttccgaacagagttaggacattatcaaagagagctcaaataatttccagaacctaaaacacattctagaatatttaagagattctttttctttatcttttttcttttttaaagaaaatttggtgccactgcaccctatggagaaaatttggtgacttacttctaggaagcttgccccagacatctgtgtcataagctgtgagttcaccagacgcctcgttaccaaacgtcttgtggatgaacatcttttctattcaaatagctttcatcctattatgggctttgattgaagacacaatccagctatctagtcagagcagcaatgttgacactgcagtgactgtgcatgagtgtttcagagttatgaggacactggtggccaccatgggcctcctgctggtcaccttctcctccttagctgcattagcaagaacatccagcactagcttcctcaagggatcattcctagtactctggaatctgaatgctaagaaattatttgaaagcctttttggctggttccactagccagttggctctcagatggaattgtgaaactaaattggacaatagctatgaatttatgttcataaataaaagacattttaggggaggggatgtcttgcttccttttttgcgtgtgtatgtgatccatgtgcatatatgtgtatatggcccttgtttatgcatgtagaggctaaagattnnnnnnnnnnnnnnnnnnnntttaagtaaatcctcctaatctagctatatttggctggcctaggtggccagcttgctacaggggtcctgtctctacagcccatgtttgctgggatctgggatcataggtaggccaccatggttccccaggatgtacatgagtgctggagatctgaaatccagtctcacagtcacatggcaggtgctttatccactaaacagtcatcctagccctaaaaaccaggtttataaggcagtttatgccatatagacacctggtttgcattcaaatgttgaaagagttcctttctatctaagatcagcatctccaactcttatctactttgcatctcttaaaccctaaccaatgggaaacaagagtctggaatttcatccaaaagcctagagtcagaaatgctagatgggataagattgaggctgtgacacctggtgtaagtacatcccagaagacaaaagccctcatccgacattttactgagtcttccacttctcactctaaaaagccttctcctgccaaaggatgtttgaaccactgatgaaggatctaacttgagcttcacataaaagtgagtctcactcagacaagttcatatctgtattcctcagtaaatcccacctagggcctccaatatattccttatactttaattccagttgggacagctggtgaaagtgatctatgcactatagattagatactgaattaatattaatttcatgacacacacacatatatacatatatatattacatatatatgtcaatggttttgtatacacacacacaaacacacacacacacacacacacatatatatgatgaatgccccattcttaggagaataaactcaaataattagggacaaaaaagaggcatcgtaactatgacttactctctgatgacctggggaaaatgtaatttttgttacataaaagatataggatggtgaataacatattaataattcgtgtgtttgtgtgcaatacgtgggatttatttttacaacttttttttccaagattgacatgacttcataatgaagttgcaaaaacaagtaagtccagcttttctaatgctcatctatgctctgcaacacaggaagctagaaatgctctctcctgatttgtcctgtttgagttaaaatgagtcatcttctctttcagctaaagaacgcttctctgtggaggtgagcatcgcagatgttttgcacatgaaccctgaaggtaaggagggttttaccgagtgcccacataattgcctcccattgtccctctcatacagacaagggcagggacgtggctatcttgattctcaaagagcatcatctcaaaccatcaatactcacacagagcagtccactatcctcaaaagggggggggggatcttcaatctctgtttcagaaaacctgatgctcgtctccttttcttgtttttctcaaaagcttttcatggttgaaatcccctagctgtgcaattagatttttatttcctctttatacttgtctgtacttgggaggatttttttgacaatgtctgggttacttttataatcagaaagagaaagattgcatcttcttttattttttcaaccagctcaataccaattctgctatcacttcctgagacatctctcggcctctttaatattgtcactacttgggcctgatccgtgccagcctatatgacaatacttatatgtggtgggctctcagttttcctcacctactaataccaagggagccctgggagccagaacctgccagcaaataggtcatggagaaatcacccacacaaagattgcctctgcatataccacagtcaaagatctaggctacttaagaagatagcagattgcttttggtctttgagacctttccttcctgctcttcaagagaaagtgaaaaactcattaagatagaaaactgactattattattagctgaagaaaaatctaagtgaaacgttcctaagatttctttgagccaccttgtgatggatgaatagtgattctcctttaagggccatctttcactccagtgaaggctggcctgtcccatggatcaaagatgctcaaagattgtcaagaccttctgagtcaaagatctttttgtcacaaagactgctctctggtagtatattcagcaacattggaatagaataccactccaaacccagcttcaacaaccaacagtgtctagatgttgcttaaggtcctgggaaggacaaaaccacccaccctgggtagtgacagtaatgtgttcagacactgcctgatgtctcctaagtgaaacaaaaatcccttctatcaaaaaagcacttctctaagttacctaagccctgccaagaccttctgtttttttcatttaagtggattgaaattcatagtgtacagagtggaaacaggaaatgtctacaaaaagaatgccataaacactttgggtataagaaatctctgtggcattaatgtcattttctagacaatccattaacataaggactggtgcgtcaatccagcaagagttctatgcatttcttcctactttcttggcttctaacccttgagttcacatggtacttgaaggatagagacagattgagagtcaaaacattatgctaagttctttagtaatcttttgccatgtggattaggaagcatagacaactggagtctgaactatgttgcaaacacaagagaaatttgcctgcaaattacttttttttttacttttatgtgtacttatttattaaccacatgtttgtgtaaaaacgttacctctgactgacttttcaaatcttttaaacatcgaggcatagatccttaactaaaattcatcttttccactccaaacagtacacagcaggtgaagttttggtaacagagagatgttccagtggttggaacaggagattgaggctccaatatcacatcccagtacacacacatagatatctactgtgcttgctcatctctaagtacccttggggcctttcatccctctggttgaccttcttccctagcatctaccctagtctcatgtcctccaccctttacccaacctgggatgtggtatgcaaagattatactcatgccagtggatatctgtgaaaacacaggcagaaacttgaaggcagttaagacaagtcaagacacacagcaacacagctcttcttcaacatgagaagaacatctagaaacaaatgttnnnnnnnnnnnnnnnnnnnnnnnnnnnnnnnnnnnnnnnnnnnnnnnnnnnnnnnnnnnnnnnnnnnnnnnnnnnnnnnnnnnnnnnnnnnnnnnnnnnnnnnnnnnnnnnnnnnnnctccagcttttcaattatgatccactagttgtaatcacttcagagcatggcaaagcaaagcaccgccctacctggcaccatacatccttttacaagaactctggcatcgtccaggctctgcccattccatgtcttctgcagctcctgtccatacacttgtgactttaaatcttgacagatctgtgagatataaagacacagaataatccaagagcactgtggaggagttgtcattcactaggtgtcttttgatgctcatctaaaggtcttcacccattatctttgtatacatcacatgtttctgccaccatccaattcttgccacttgggcttctactttgactaaaatatggtatcattcaaaatctgtgtgctaatcttggcatatagacatgtagctcgctgatacatttcttgcttagtatgtgtgatactctgggctcactctccaacagaagacagaacagaaagacttggagtgttgcctatgagggttaataccttagcttatgcatcatatttgcttatgagttggactttcttgtccacctgggaagactttgaacttggaactcaatggagacttagttttgtttttgtttttgttttgttttgttttgttttgtagtagagaagctgagtgcactgaccctcattcactatgccactagccccaaataccaatttaaatataagcctgttgaaattaaatattaaaaattcagttcctcacttatattgaatccactcccaatgttctatagctgcacatgcttagtggtcatgttattgggcagggaatatcaagaatacttccattacaacataagtttctataagaacaagctgaccatcccagtgaggagctctgggaaagtgataaagctcaaacagacaggctcagcagtgagggagagagatgacagaacaggattctaaaaagaaagtgaaaggaccagtcaacgtacttcaactaggtcaacaattatatcactgatacccaaccatgaacaaatgtacaactactctaccacaaaacactaggaaacaaagaagtaaccatctttgagatggtctttgagacccattttctcccctgtctagtctttggagtctgtgaactcattgtgaaacaagaaacttttcttctgaatccagaggcaagaagatcctaagctgtgctcacacattgaagccaatgaactcccagtcaatcgagaaagcaacactctggtagccatatacaaaagcctatttagagctaggattattcaaaccaaagaaaacaatacaaggcaaaggtaccatctctctggggacttttgactctataacaagtccaaggaacacaggggtttccaggacaattattgtccctgtaatggagcagatagtgtggtcatggcctcctgctgacagcagtggcttatccttacctagcacattgtcaacaaatagattacttccacaaagtcactcatcttagtctctcctcacagagtcaccgagggaagaagagcagatgtggccctctgtactttacatacaaaagagtgaaggcacagaaagagaatgagacaagccatagttagcaaggttggtgaaattcaggaccaacaatagaaaacagccacctaacctgtctgcagttcacaactcctctctctggagatacaagtcacttagcacctgttcaggtccctaagtctgtcatctccaaggctatgacctcctcatagataatgctgcaaactcagcttgtcactccatccctgtacagagtccccagcaagctcactgatggtacctcatctactcaaactgctgtaagaggggacagaagcaattgttactaattctgttgctgcccttctcagaagaccccttctttcaagcaaaaacatacctagtaattgcagaaaaaaatcagtgtttgtctcagtgtatacactaggtctaccgtctatcttcctggcaaaagtcaggtggaaaatgctaccccccaaaatactctgtctgccttgagatactcttaatcatggcagattttatttctctagaaaactgagttagaatgtttccattcatatgactttcaatagcctgtaaccaaatatgatatattctcacacttgaatgaactcatcattcatgatgtctaatagtcatttgcattcttggctacatgaaagattggattcgatattttcctttagcatgcaaagatatgcagagtagatatagcctttatgtctgataaactgtaaacacaaaatccaccactgactaaaacagtgaagaggaagtaagatctaaggctgtttagataaaataatattgaagatggcaacaaaaattaaaatgctcactttaaatgtttcccaactagctgacacatccagcattgtttggcttggaaacttgacaaagagcaaagagtgaacgaataaagggcagatacacatacagaaaagccaagttagccaggctatgcacactctaaaagaacagcactgtactggctggttttatgtgtcaacttgacagctggagttatcacagagaaaggagcttcagtagaggaactgcctccatgagatccaactgtaaggcattttagtgatcaagggggaaaggccccttgtgggtgggaccatctctgggcttgttagttttgggtagtcttggttctataagagagcaggctgagcaagccagtaatgaacacccctccatggcctctgcatcagctcctgcttcctgacctgcttgagttccagccctgacttccttggtgacaaacagcagtatggaagtgtaagccgaataaaccctttcctccccaacttgcttcttggtcatgatatttgtgcaggaatagaaaccctgactaagacaggcaccaactccacagcaccctggaacctcagcgtgttgactctgtagagcacaggagggagaatgtgcctaatctcagtaggaagtcttactagctatgcaatctcagggcaaaaacttccaggaggagaaattgtgttgctagtttttgcccacactggtcagttggactgcttgaacacactttcaacatttgcatttgaaccagaggaaagctttaccatccctctaaggctccaactaggcgtgcaatctttgccattcccatgcatctgaggagttggtctttgacatggctgtaaacatgtcaaacaatacatattcactcagaatttcatctgttcttgacacactcaagacttacgtgtggctcttcatacctagcaatgcaccccttgccttccattacagcagaaccccagtgtttctcagtcggcatcaacctttctcttcatctaagccattacacgttacagttagactactgagctagctatgtcaagttttgctatctgcccaaggcaaatgggccacgctctggagattctacttcctcccagggctgagtaagtccagactctaagcttcttctgcatctttttgtggcatgaccccagagaggatacttggagcagcaagccatagcatgcctggctaaaggtggattaaacactgggcatgtagcactttcctaagaaattctgggaaaatcagttttaggtttgatttagcaggtcatgataacttcaaggaaccagcgtcaggatgaacggtagaaggggggctcctctccctctttctttcagcagagagggaattttctgctatgccttcatcactagaatttagtgggatggccattcctaaggctgcagtctggacaaaaaaaaaaaaaagattacaatggccctgattagcatagcctgttacttcctcatcccctggggctggatgcctgatgcctgactggactctgcataaaaacaaagggagaagtagttgttggagaagaaacttatggtatctgccaggctcattgggtggataggactgtgtcaaagacaagacaaggacgtttgttctcaccagagaggcaccctccacagggaagcagcgtcatctcctcaacaaggtcagatcatttatgacaataggcatgacacctacagagcatttttttcctacacttgtcatttatgtgctttactggagactctttgagagatggtatgtgtacactaaaggagttctttctgacaaaatttattttatgtcctgttcttacatctaactatacatagctagatgaaaagatgggtggatgaatgcatggatggatgagtgagtgggtgannnnnnnnnnnnnnnnnnnnnnnnnnnnnnnnnnnnnnnnnnnnnnnnnnnnnnnnnnnnnnnnnnnnnnnnnnnnnnnnnnnnnnnnnnnnnnnnnnnnnnnnnnnnnnnnnnnnnnnnnnnnnnnnnnnnnnnatggatggatggatggttgggtggatgggtgggtggatgggtggatggatgggtggatggctggctgggtggatggctgggtggatggctgggtgaatggctgggtggatggctgggtggatgagttgatgagtagatgggtggttggatgggtgtatggatgggtggatggatggatggatgactggatgggtggattgatgggtgtgtggatgggtaggtggatggatgaatagttgaacatttaaatcactaacatgggtcaatctacctgttttctaacctgccccactacactcacagctggatctttatatattcactcctttccattcccacccaacaagtctacaatgaaagtattcactctattccctgaactagccttgggtctggttgttacctctctgactggttggtaccttttctgcccagaaggttgcttctgaagaagaacaagatggaaaagggagaaggggaaagcaagtaattatcttggtagatatagttgcccagatgtttgaatgcagaagtaagtctgaaagaacatcttgttcatgagtgataaagtgtgactcagaaaagtagagacaggttgtgctcctaaggggagcacagagaggagggttgactttgggactggttctgagcattatgaggtgggagagatgtgtaggctttctgtgttcctggcccagtctgtgaacctacaattactactatcctttagacttccagctcctagtgctttgtattacaagtctgttgagccagaggaaaatttacacagagaatctcacaccaggagccctgctgaagtttcttctgaataagatggcctggtccttctcggggcccctgaagaagatattttctgcaaaactgccattcacctacttgtcagaagctgaatggcaaataatgggttcctggatgttttaaatgcactcagacacagtaatgcaattagggaaagtaggaggaagtctcgaaaacaactgagcagccagtgggcatgagagctgttgaaatccttcactctagcttgagagataggtacatgttcagctacaaaaatggttcatggaggttggttctcagccactgctttactcattgccagagacacagaggtccgatactctatggtagcctctgttcacaccactgaatgtcaggttttccttagcgagctggttttgttgcattaatgatggtgttcaaatctgcctcctcagttgcaatagcagtcactttttatttcgttacattagaaaagtagtcattacccactttagaataatattccctcccagagggattcaccatttctgtgttagcatgaatctgtttcgtatccactgtctgagcacccgtgcaaagacatttgtgagacattaggatcaggcatgtctacttcctgtatctaattattcctgcacttcacctctggaagtcattgaaattttaatcacattatgtcaaggcttaaataatattccactgttgtctatgctatgatctggttaagcagccctttaggatctggtgtttagattgttttctaataatttgggctttataaataacactacagaggtggactctctttattctaatgttttgtgcacctaggttcactcaggttaaagttctgaagtgtattttctgattcaatgtgtatccgtattcttgagacttaacatatgagaaaagttaaaccaatgtacactcaaaccacaaatccaaatgtatttatacactcagtaataccattctgaaacctccagggttgaaaaaaaaaaaaaaaaaaaaaaaaaaagagtaaaaataaaatattttatatgaaaatattttgaaaattaaaattccattaaaataaacattgtcatactatctatttttaaatgacacaagtagaagatgtcagcttctttgatgaaatattgtggtgttaatagcctttttaaagtcccaaatccttgctaacttacctctctacattcggcagacactcagacactcaacacaggttatttcctcagaaccatttactgaatacccatagagtatagagctttgttttaaatttgaggattaacacacacatacacaaagaattaatcaatgagcttctagtctagcctgaagagctactagagtggggaattgcataaagataagtcaaaatcattatcaggactaccctgtacaacagctttgtgagacctaaagtgtctgctggatgggagatgggacagagaatcaggaggtatctggtctttccattggatgaccatgaacctatctttgctgcttctaaaaatactcatattttctagtagccagagttctggatggaaagagagacatcattttgggcaaagacttattttaacagtctatatggtaggattaataagatcccaatgttaagtatcatctaccattgctctagaaatcaatagagctttgtggtgaattaaatacaaaaggaggggctgactatacaactgtttggaaccatagtaggacgcagagattttagggaagtgtgagggaaaataaggaggggggggggcgcaaatattgccactgttggaagaacaagacaaggaattttgccaagtatctaacgtgtggtggccagagaacccttcagctttgtcaaactacaaaatccttgctctttttaatgcttggagtgacaagggtctgagtgtagtttccagatgggtgcctggtgagaacgaaggccacctactggaagctgtgacacttcaatactcacccttcattctgttcatgtgtaagctctaccatggactcagaacagtggtgctgaagctggaaacccttcccttgaactgtgcagggtataaactgcccatgacctgcttctcttctcattttaatctgatggatacccaggttcccatgtgcttggcacatgagcctacagttttaaagaacaagtggggagtgtaatgccatcttttagaccataaagggcatgcagaggttttttcccaaacacccaggtatgtgtgagccctgccacttaaggacacctaagaaaagcatctcaggctattatagtttcaaataaattgaccattgatagaactaagagtatcatcaaagcgaccaatttttctcccaaatcacattggtttgataatattaaatcaatttctgtttctaaaactcagctgacagcctttggactacactggtgcctgccaggctatggactgaaatccttatgggtgattcccaagtagagtctttgtggaaaacaggaaaattgaactaacctttgagtattgacatcccaaactattatccctttcatagtttcagagagtagtcgttataaggcatggtgctgattagatgttatggaaacaggcagtcattttattcttataaagcaaagagtaacaatgatttgctggggattgcctggtcattgttatggtagaaaagtgtgtagatgtttacctaggcctgttctacttcattgacctgggaaaactactagtcaaatggaaagtggggccccgatttgcttgataaatagcagtgtaatggaggacctaagaaatacagagatacagagaagtattccttccataacttagagccacacttgagttttacgacattaagcatgctctgttttttttctaattgatagtttcttttgacatgtttttatttactctttgaatttttcatataatatattttgatcacattccctctcccatatcctcccaaccaatctatctatctatatatctatctatctatctacctatctacctatctacctatctatccatctatccatctatctctatctctatctctatctctatctctctcaaaataaaaaataaaaaaacaaaaatcaaatccagttttccttggccaacaactctttgacaggggacctgttttgttgcttttaccttacaccactacttaaagctcagctaagcagctcaactctctggaacacaaatgagatccagaaagcaaaccaaatagacattttgatgaagtacatgtaatgaaagccatttatctataagacaggtggaaaattcctttggtcctccctcacaacttattgtcatcatttaaatgacttcaactttctaaatttttattttcatgttagctttccaactttgcagatcaaaagcagcgatggaatgaaatggatctgtttaggcctactagaagagagttagtagcaaaaacagctattaactattaaattaaaatttttagggagcaaaaacaatgaaggatagaaaggtcgggagaagaaaaaaagacagctaacaagaaaatagctaggcactgaggatccttgtgtcctaggtatctgatttaagggtctttggtctgtatttactctcggtatagcatcctgtgaccatgccactcactataactgatatgttcacaaatgatatcagtgttctgattaagaagtcatagaagtaaataatatttacatttgtatccaattcattaaaatattttttatctgagaacatgctttacatagctagatacatagctaccctgtgatgtgttttcattgaaaaatacacattttttaaaaatcattttatttcatttgaagattgtacactcgaagttttgtttgctgctgaaattccacacattccttcaattttcaataattatatttcttatgtaatttggctattagccagatgccctggagccaaatctcattgtatgttttagtacatctgttggcgccaaatctcattgtatgttttagtacatttgttgctgagttcagtttaatgcacatgaaatggtattggaggaatgcacaagaccttagtcacttgaagtgcatcttaataggaagaaagaattccctgattcaagggtacatgttattgctcctctccttacccccgtggatctgagactgtgagaaggggtgaaaatattatgttctttatggttttctataagtgagtcagtccgagtttgtaacttagtggtagattgctcacttcaaaatcctgacgctctaggttcaaaccctggcactacaaagaagggagaaaatggtaaagcaaccagtcattcagcaagtgttactgcaccggtgaatgtgtgcaaagtgacaacgcgaatggtatagaagctgaacaaaatgactttgataatagtgttcacagtgacactgaatcagcacaccagacatcaaaggtttacttactcataggtactacttgattgaatactgtagttatcacccaaagtaagcagtaatagccagccatttccagattattcatagattagtcaggctaagtaaaaccaagcatttccgatactcagtctctagctacaaagcttactaactggattgttacttctcagccctataaagttcagtaggttctgagtggaattctagagcttcccttctgttccatgatctcttgggtccacaaactactacaggccaggagagagaaaggaatgtgcagacaaggatgtggaggggcagagtgtatttatggaaagagctttaaaggtcaagactagaccaaaaaaaaaaaaaaaaatgtagcctttctccccattctccaatgccacagctcaatcatctgaccccatgtaaccataaaaggaacagttagaagaactttagctgtagagagaaaggaagaatagacccaaactgtggcaggttctggatccttttccttctcttgtgagggactctcaatatcctcactgaagtggtaaagaaaagtacaacttagaaagaagagataattttgacatattcttggggtgaatttcttgttggacttactagttttctcagatgtaggtacagctcatcctcagtgctctaaagatattcccatcagacacctggctattttcccattgatgctcaaaggaggccatgggttactcaaggccacacagtcactgtgaaaagggaagaactggacctccctcacactcctcaggcttagagatgaacctggaccagattttctcaagtctttggtttcctttcagtgcattttggagtttttggattcaaaaactccaaaaatctcaaacaggcagccagggagtcagtaaaccgataattaatcttttttattttcgttttcaattttccatttacttccaagcttgtttcaagaaattaagaaacacacaaaaatagataagcttgttaccaacagtaatttgtgtgtgctcatgttttaaaaggaatctaaggttcttttctgtttaattaaaccgcatgcacacatacacatacagctctgtaaaacagaattttcttctaacaatctggcaaaacatatgtctcctcctactacagtggcctcttggtagtgacagcttgccatagaaacaaactacagtgagatttctgtgacttgaaacaacattcatttttttaaaaaaactctttttataagaggcagcaggctgactctggtgctgctgagattatctgggctcctctgggctctggagaactttttgccttcttgttttgccacccaattgaggatttattatcttatactaaatagctccataacttagaaaagaaaacctcagccacgtcctgtgactgtttctggatggatggatgcagccaaagtatcacccagtcaccaccacctttcaaatggatgagtctaaagtaactggattgcagtgtgttccctttccaacataatgactcagtatgccttataattatacatgcttccccatgactcggaataagaaaatatttggggacaataatccacttagcctgtcccaccaccacctgaccttcattcatcgaagtctcaaatgtggcatttctcagagaaagcagcctctctttctctttttctctgtttacctctaaatggagctctctaaattcagctccaatgtcagtcacagaattacatttttcaaatgtcccttcctgggccctacatccagagacatatgacattaggagatagtgtatacagaaaagtctctaaagacaaggcccagggaatgtctactactataaaagaagaactactattggcctcacacagtacccagcattagagccacctttgggaagttggtttgagcatagagacccttatcaaaacaagggaaaacagccttggagaagtcacagtctgtggtagcaaggtcaccttacctgttccctgctctcataccaggtacattttgtatgtctaagatggggctccttaaaggtaggatcagtggtcctctgtagatatataaagtagaaagcatgcgataaatatacaaattctggtgttcaactcctaagatcttcttcacccactagctatgtgatcttgggcagttcatagaacatgtctgagctgcagcacccttatctgtgagatgagaataataagggagatagggtcctagtggcctttaattaataaagatactgaggaagccatataaagcacaaagattacaagttcaaagcttgccttggacacagggtaagttggagatcaacatagtcaacttggcaggactatctcaaatatagttggaaagtggagtggagttatacctagtaataaagggctttcttagcatgtgaagccctaggttaaaaccttactaccagggggaggaggaagagaaaaagaagaaggggaaggtaggggaagaggtatagggagagagaggaggagcagaaaaaagaagaggaagagacagaaaaggaggaaggtagggttgggttcagactcaaccccactcttgtatattatgtatacataacctatacacatcttcctgtacactttaaatcattccaagattatttatgatgcctaatataagctaaatgatacattcagttatcatactaccctatttagagaatgacaaagagtcatatttggttacaatgcaaatgctttccaaatgcattcagtctggagttgatgaaactacagatgcagaagctgtggatgtggagcgcccaaccatcttccgaagctcaggggacacagtataggaatggaaactctcccacactgggagtgtgaatcgtggtttgaaagccactgcagcctgtggagctagctgtgaaacattctatccaaaacatgttgcctttgcactgttatttattgatggatgatctcatgagtaactggttcctctggacctcaggccaacatggattttctaacatctgtccaaactctgccctggacagggagaattaacatttacccaattcctattctttcctttaagccaaaaaaaaaaagctgattaaaaacaaagctctgcagtaaaaagaggcagcagggactctaagttgagtgagttagtgtaataggagatgggtgtgatgcctccacctttgggtaagcatctacatgttaaaatcaccctagtgcagaagtgaatacagcactgaactgtaatttgctacatctagctttgaagatagaactccctgggacactactctgatgttggaccaacctgtgccagctcccatttggaccgcactgtctctgctagttaactctacatcttacagaatgcagctgtctgcatacacagcacatggccgtacacagcacagcttcctctcaggaacctcttcagtttttgaaacaggaagagaatggggtatgcaaactcagaagtgaatgttttaaagtgtctccatagctattgctagtagctttcacacaaccatgatgatctagctaaaccactgagcagttatccaaatggcagccaacttaggatggtgcacagggaggacagatcttctggaaattttaattgaggataaattaccaccctgtggtgtaagcatctttgcgctagattcattttaataaaagaaatgcagatcccttattcctagctggagttattgctctgaaagccaacgtacaacaatcttaatcttcagcatggtgtgaaacagctaatcccttctgttcttctcttccccctgggaagattatgtcttttgttttcaaaattaaatgctagcattctgtattggaaagaaaagtcagactcctgagaatcaaggggcacatgtgaggttcttacccagttatttcaccctctggccatttagtactgggggcaattgaggtgatccagtgagcagaggagcccaaaggatgtacctagcagtgcataacacttaatagataaatttatttaatattagtttacaaattatggaggcttttttacatttgggagacagaaatgttagaaatggatttaggttagtggaagaatgtatggctggcagtacactcagtgcttatagtaaagaaccattgttggtgagctttatgtgtgcagggctttcttatgagggtcttgagtgctaccagagggagagtctggtttttaccctgataagttctctgttctctgccacattgccctacaacgttaaatgtacaggtagcaagcgctaagtggattcagtgagtttggtttggtttggtttggtttggtttggtttggtttggtttggtttggtttggtttggtttggtttggtttggtttttaaaaaagcacatgaattgaaaggaatagtgttagggagggttggtgataaattggtggggaggaaaagggggcatctttgatcaaaatgtattgtatatgtatatgaaattctcaaacagcttttaaagttgtccaaaaaccaaaaacaaccctaacagtagaattaatgtagaaattacagtatcacattcagcaaaatataaatgaaataaaacaaaaataaattatgtgaaactacatacaacaaccagaatgtatcatacaacaaggtagaatgacagaaactggatacgcacattcattaaatgcttatgatgcgattctattacaggaagttgggaagtactgttgggcatggggtagagatcaggaggaggcactggttggatttctgggctactctttgtgatcttttgcaacttaggtggaagcatagagctattcacttgatgataacttattgcaaaatacctaagatttattcttcttcaagtaagtcttaaattgtctttgtccatcaaagacaaggtttataagagctaaaaagatccttagacattctgccgagcttactgggaacaattctagggttaaggagactgagtcaaatagagagaccacagtgacaaaagaaaaaaaaaagcagcatggagaagaaaactggaagtatctcctagcaccaaaggatggaaacaaatcccacatcatgggagagttaagccttccttcagacttttataattgataatctcagtggtgggtgggccaaagcatgcagagaagtataagcagaaaggactacatcagaaaagctaacatcaggcagtgatctggtgagagttcagatctgtcctatttacctcttgaaggtaatactgtctcctattatttgggatgctttccacaatgtggatgggagggaatactgtaggccattggaccctgcctagttttccatctaggaaggagtcattctaggttcccaaaagaatgagccggactatagattgcaaactcagctgttgacctcaatggaagagggttggtttaatggaggacagcaataaagaggggcttctggaaggagtgggtctaagtaggaccactgttgatgcacaaggcatacctaggggaaaatggttagttttcttggcat

SEQ ID NO: 176 - DNA, 1831 bp, Mus musculus
atgtcatctgcacttgcttacatgctgcttgtcctcagcatcagcctcctgaatggacagtcaccacctggaaaacctgaaatccacaaatgtcgttcccctgacaaggaaacattcacctgctggtggaatcctgggtcagatggaggactccccaccaattattcattgacatacagcaaagaaggagagaaaaacacctatgaatgtccagactacaaaaccagtggccccaattcctgtttctttagcaagcagtacacttccatatggaaaatatacatcatcacagtaaatgccacgaacgaaatgggaagcagtacctcggatccactttatgtggatgtgacttacattgttgaaccagagcctcctcggaacctgactttagaagtgaaacaactaaaagacaaaaaaacatatctgtgggtaaaatggttgccacctaccataactgatgtaaaaactggttggtttacaatggaatatgaaattcgattaaagtctgaagaagcagatgagtgggagatccacttcacaggtcatcaaacacaatttaaggtttttgacttatatccaggacaaaagtatcttgtccagactcgctgcaagccagaccatggatactggagtagatggggccaggagaaatctattgaaataccaaatgacttcaccttgaaagacacaactgtgtggatcattgtggccgttctctctgctgtcatctgtttgattatggtctgggcagtggctttgaagggttatagcatgatgacctgcatctttccaccagttccggggccaaaaataaaaggatttgatactcatctgctagagaagggcaagtctgaagaactgctgagtgccttggggtgccaagactttccccccacttctgactgtgaggacttgctggtggagttcttggaagtggatgacaatgaggacgagcggctaatgccatcccattccaaagagtatccgggtcaaggtgttaaacccacacacctagatcctgacagtgactctggtcatggaagctatgacagccattctcttttgtctgaaaagtgtgaggagccccaggcctacccccctgcgttccacatccctgagatcactgagaagccagagaatcctgaggcaaatattcctcccaccccaaatccccaaaataacacccccaattgtcatacagatacatccaaatctacaacatggcctttaccacctggccaacacacgcgcagatctccttaccacagcattgccgatgtgtgcaagctagctggaagtcctggagatacactggactctttcttggacaaagcagaggaaaatgttctaaagttgtctgaagatgctggagaggaagaagtggctgtgcaagaaggggccaaaagcttcccttctgacaaacaaaacacatcttggccaccactccaggagaaaggccccattgtctatgctaaacccccagattacgtggagattcacaaagtcaacaaagacggagtgctatcattactccccaagcagagagaaaaccaccagacagaaaaccctggggttcctgaaaccagtaaggagtatgccaaggtatctggggtcacggataacaacatcctggtgttagtgccagactcacgagcccagaacacagcgttgttcgaggaatcagccaagaaggttccaccatcgcttgaacagaaccaatctgagaaagatctggccagctttactgcaacctcaagcaactgcagactccaactgggcaggctggattacctggatcctacgtgcttcatgcactcctttcactgagagc

SEQ ID NO: 177 - DNA, 1827 bp, Mus musculus
atgtcatctgcacttgcttacatgctgcttgtcctcagcatcagcctcctgaatggacagtcaccacctggaaaacctgaaatccacaaatgtcgttcccctgacaaggaaacattcacctgctggtggaatcctgggtcagatggaggactccccaccaattattcattgacatacagcaaagaaggagagaaaaacacctatgaatgtccagactacaaaaccagtggccccaattcctgtttctttagcaagcagtacacttccatatggaaaatatacatcatcacagtaaatgccacgaacgaaatgggaagcagtacctcggatccactttatgtggatgtgacttacattgttgaaccagagcctcctcggaacctgactttagaagtgaaacaactaaaagacaaaaaaacatatctgtgggtaaaatggttgccacctaccataactgatgtaaaaactggttggtttacaatggaatatgaaattcgattaaagtctgaagaagcagatgagtgggagatccacttcacaggtcatcaaacacaatttaaggtttttgacttatatccaggacaaaagtatcttgtccagactcgctgcaagccagaccatggatactggagtagatggggccaggagaaatctattgaaataccaaatgacttcaccttgaaagacacaactgtgtggatcattgtggccgttctctctgctgtcatctgtttgattatggtctgggcagtggctttgaagggttatagcatgatgacctgcatctttccaccagttccggggccaaaaataaaaggatttgatactcatctgctagagaagggcaagtctgaagaactgctgagtgccttggggtgccaagactttccccccacttctgactgtgaggacttgctggtggagttcttggaagtggatgacaatgaggacgagcggctaatgccatcccattccaaagagtatccgggtcaaggtgttaaacccacacacctagatcctgacagtgactctggtcatggaagctatgacagccattctcttttgtctgaaaagtgtgaggagccccaggcctacccccctgcgttccacatccctgagatcactgagaagccagagaatcctgaggcaaatattcctcccaccccaaatccccaaaataacacccccaattgtcatacagatacatccaaatctacaacatggcctttaccacctggccaacacacgcgcagatctccttaccacagcattgccgatgtgtgcaagctagctggaagtcctggagatacactggactctttcttggacaaagcagaggaaaatgttctaaagttgtctgaagatgctggagaggaagaagtggctgtgcaagaaggggccaaaagcttcccttctgacaaacaaaacacatcttggccaccactccaggagaaaggccccattgtctatgctaaacccccagattacgtggagattcacaaagtcaacaaagacggagtgctatcattactccccaagcagagagaaaaccaccagacagaaaaccctggggttcctgaaaccagtaaggagtatgccaaggtatctggggtcacggataacaacatcctggtgttagtgccagactcacgagcccagaacacagcgttgttcgaggaatcagccaagaaggttccaccatcgcttgaacagaaccaatctgagaaagatctggccagctttactgcaacctcaagcaactgcagactccaactgggcaggctggattacctggatcctacgtgcttcatgcactcctttcactga

SEQ ID NO: 178 - DNA, 96599 bp, Homo sapiens
cttccccagggacacatattgaataggcctgcaatggggccttggaatttgcattttaatggccacctcatgttattctgatgcacagctatgtttgagaattatggctctaaagcaaagctctccaagaaagaagtacatacctaggtatacaagatgatccagtgagttgaagtatgaaaataatatagtagttatttggggtattttttctaagaaagaaactaatctttactggtatttagattgacaatagtgccttcactgagttctcaaattagctcaacacaagttctggaaactacacaagataatctccagaatcaaaaagagttcagcaaacacacgggggttgccatggtacctccactgcttgattgccatttatgtgctacaggttttcatcaatgcagtttattttataaaagcaagacctttagaatatgcaacttgacaaaatagggagtgagtatgaaaatgtctggtaccacacagaagtttcttgtttaattcatgacgaagtagtaaaaaagttgttggatttaaaaatgagttgtccatttccttttacaaaacgataattgttcccaaagtgtaaatctcaaatgcatgatgctgagtgaaagaatgctacatactgtacaattctacttacatggcagcctggaaaagggaaactataaggatagagaacagattaatggttgccaggggacagggtagggacagggtttggctacgcagaagcatgagcgtattttgaggggccgggctgcggggcggtggggtgtgcgggagtaatgaaaccattctacatctacattgtgatggttatgtgactttttgcatttgtcaaagctcctagagatatacactaatgagtatgaattttatagcaagttacaccctaaaaacattcacttaaaaaaaagtaagttttgctgaacaaaaagaaaatttctaccacctttcatgcagtatatttttcagccataataggtgtaaaactaaaaactgaaaataaactaaacttagaaccagatctgcatatcactgtgtctcaaagtgttaagccaacatcttttttttttaaaaaaagcatacttaatcacattattctcattaaaattttgataattaataatttcagaactaaatggtttataccattaaaaataaaattatttatttattattttaaataattttgacttttattttagattcgggagtacgtgtgcaggtttgttacatggatgtattgcatgacactgaggtttggggtatgaatgatcacgtcatccaatgagcgcagtaccgaataggtagttttcagtccttgccccgctccttcccttcccttctagaattcctcattgtctattgttcctatctttacgtccatgcatactcaaagtttagctcccacttataatagagaacatgaggtatttggttttctgttcctgcattaatttgcttaggataatggcctccagctgcatccatcttactgccaagtacatgatttggggtttttatggctgtgtagtattccatggtcaaatttttgtttcatcttatttcattcttttaaaatttctactttcattcatttataatacagtagtacatatatataatttatgactaaaaatacatatgtatttggaaaggcatgctaaaaatgattttactgctaagatgataaacagaaaactttggaggtcacttctctagaaaataactcttcaaaatttaatgtacgtaggaactacctagggatcttgttaaaatataaagtctgatgcagcaggaagtctctcaccagatcaaatgctggcaccttgatcttggacttcccagtctccaggactgtgagaaataaatttatgttctttataaattaaagaaaaaatacaaagtctgattcacaaagtagggatggggtctgagatcttgcatttctaataagattatgattaatctaataagttgaaatcatttgttttggtttaaactaattaccaagtcaattcattctaataccttccgggttcactcatagactaggcctagggttaaaatgataattagtatgatgccagtgcacctggccctaagactatactttgaatagcaggactcagaccacagtagcccgaagacatctatgcagctattatagagactaacaactgctgcatttgattcagcagactcagttttccctctttgggtttgggagacatgaattcttatcagtcaataggccagctctcttagcatcttcccatggagcaaatgattcccattcccatgctcataaaagctgattttacttaggtcactgcttatccaccagcgtgggtttccttagaaggaaggacacattgtctaataatagcagtgccttatatttacacatggtttataattaaccaaatgtcaactcatatcagcctcacaatgacctttggaggtagaacaaagcagatgtattataaacccatttgcaagtgctacatgacagaagcaagcacagtgctttctttcagagttggagtgatcaggcaaagctttaagaagaaagtaccatggagtctgaagatcaagaatgggtaaggtttttagatgaagggtgggaaataacattccaagaagagaggatggattcaaacacactgtagatatgtattgagctactactactctaaagcccaatgaaatcagcaggagtaaagatgttctaactttattctgtgggaagtagatgccattaaaaatttttaattcagggactaatgtaatcaagtttaccatgaaagcatttgagtttgatgtaggcaagactggtgaagatgagtccagccaggggggctattgaagaggaagaagtaaaaaatgatgaaggcacaaattgaggcaataacagtggaagggacaaaaatatttaaggacttcattccttttttttttttttattatactttaagttttagggtacatgtgcacattgtgcaggttagttacatatgtatacatgtgccatgctggtgcgctgcacccactaactcgtcatctagcattaagtatatctcccgatgctatccctcccccctccccccaccccacaacagtccccagagtgtgatattccccttcctgtgtccatgtgatctcattgttcagttcccacctatgagtgagaatatgcggtgtttggttttttgttcttgcgatagtttactgagaatgatgatttccaatttcatccatgtccctacaaaggacatgaactcatcattttttatggctgcatagtattccatggtgtatatgtgccacattttcttaatccagaaggacttcattcctaattggatgtagagtgtaacagagagaacactgacagttgaagccataaaaaaaaaataataagcttttatatctcaaggcccataaacaagtgcatgccctttgacctagttgggcctcacctggtgttttagacaaaggaaattaattcccaaaggcaacttttttttctacacttcccataagtatgtttattacagcattatttataagagtaaaaatttgggaacaatctaaatgttcataatatagaatgattacataaattattgtgcaaaaagattataatgataagattacattaaaaaattgaaggatacttttaaaaagatataaatagatatatttcctggatgggaagaattaatgccctaacaatatcaatttttctcaaattaatatataaatgtaatgtaatgccaaaaaaagattttgaattgaacaaattgaccctaaaattttatgaaaaaataaatatagtggacttatcaagacaatttcaaaaggaaagtgacagtgtgctttgcactaacaggtattgtactgtttttacagttacagtaaacaaaagtctatatttttggcatataaataggcatctcaaagaaacagagtagtgtcccgaattcatataaatatatatcaaaatgtaacacatgatatgtgacactagaaatcagtggagaaattatgaatttttctataaggggtaaaattaaaaataaaattcaggagaaaattaactgtctaccttatgtaatagttaaagatctattaaaaaaaaaacaatttaacagagttaattgcaaagaagcaatacaaaaaacccaaaagctgtaacagaaaataattgacagatttgagtacatgaaaattaaaaacttttgtgcaatgaaacagtccataaacaatatcaaaggaagcctgacaggcacaaatgtttgctatacattgaacaaagtgttagtatgtttaataataaaagagatgccaaaaattaattttaaaaaatatggaggccaggcacggtggctcacgcctgtaatcccagcactttgggaggctgaggttggtggatcatgaggtcaggagattgagaccatcctggctaacacggtgaaaccccgtctctactaaaaatacaaaaaattagccgggtgtggtggcaggcgcctgtagtcccagctactcaggaggctgaggcaggagaatagcgtgaacctgggaggcagagcttgcagtgagccgagattgcaccactgcactccagcctgggcaacagtgcaagattccatctgagaaaaaaaatatatatatatacgggccaggtgtggtggctcacaactgtaatcccagcactttgggaggccgaggtgggcgaatcaggaggtcaggagttcaagaccagccaggccaacatgtgaaaccctgtctctattaaaaacagaaagaaatgctggtcgtggtggtgggcacctgtaatcccagctgctcaggaggctgaggcaggaaaattgcttgaacctggaaagtggagattgcagtgaaccgagatcatgccactgcactccagcccaggtgacagtgcaagactccatctcaaaagaaaaacaggcataagattgaacagccacaacataagagaaaaagtcaaaatataataagcacatgaactcaaccttgaaggcaatcagaacactgtgaattagaacaacaatgagctatcatattttgcttatcagactagcaagataagattgataaagtccagtgctagcaaaaatgtgagtaaacatccttggtaagagtggacactgaaacatttgtggataaaaattggaggtatatatgaaaatttaaaatgttcctaccctgtggctcagtaatctcatttctagggctttctccaacaacatatttggagagcaatttggtagctatcaaaattttaatgttcattctctttgagccaaccaagtcatttattttttattttatttatttatttatttatctatttatttttttgagacacagtctcaatctgttgcccatgctggagtgccatggcactatctcggctccctgcaacctctgcctcccaggttcaagcgatcctctggcctcagcctccctagcagctgggactacaggcgtgcaccaccactcctggctaatttttgtatttttagtagagagagggtttcaccatgttgggcaagctggtgtggaactcctgacctcaggtgatctgcctgccttggccttccaaagtgttgggattacaggcagacgcgagccaacctgcctgccaatcaggccattctaagtatctatcctaaagtccatgcaaagacaatcctagcagcacttcttaaaataaaaagctggaattactaaagacctaacaatggaagaatggtagaatatattacaaactatgtaaccattaaaaaaaaatggagtaaatctatacatagttacctggaatatgtgatttcattaagtttaaaaaagaaaagtcacagaaattattgcattttgaatttttaaaatatttgcatgtgcatacagagacatgactatatacacatgtaaaaaaggaggcaaccaccaatacgtcaatggtggttacctctgagacaggattagatgaaggaaggaggatgtgtgatttggaagtactatattttactgtatagataaagatgtagatttctttttaacagtgctaggatttggggtagttttttaatctttggatatttttagcagttttctattttttttctaaagaaagaaacatagttctcccacatatggacatgccattcttctgaggatgcttaagttgaccccaggaggagccctagctgctgttccccattagaggccccttttcagcaggaagtagccagaaagagtccttgcccaaaaccccctaacagcagttagtgtgatatcgccacagggaggaatgtggcatgagttatcaagaaattattttaggcagatagagagtaaaaggggtccttgggaagttttcattttttaaagtatctccagaaaagtttcttgtaaaaccccggcttttagagccaggcgggcaacctttgatatgcaaacctaggccattagaaactgggttcacccaaacatgccgattccagggaccttcttgcccttgccccacatgttcctggcaacatggccgcccccacatatccctatttgtgtagaacatcatggcgccccgcatttgcatattaaaaggctagagtgggagggccagctctttcatgggctacgtgaattacgtgcctagtcaaaccaatcccctgagccctaggcaaatcaaacaccgcctcctccagcctctgcttatatacctggctggtatccgcagcaagtggggacttactcttttggctttggagcgcccccctccctctgtctctgtacagggaagcttcttctttcttccttctccctttccttcttgacccttcttgcctattaacctctccactccttaaaaccaaaaaaaaaaaaaaaaaaaagaaatgtggttctcaaagaagacaaatgaagtagcaatgataaaactccttccctatttgagaaggaggagagagaaaaggagccacggcagaaaccaacagaggaatgccacagacagaggggaggctcccgccagaggatggcagaggcctggaagccaaggcgtgagaacttcaagaggaggaagtgaaccgaagcccagtgctgcagagaggcctggagggccctcccagagagcagccagtgagtggtagtgatgaaagccaggtgcaaagaattcaagggagccattttccaccctgcctgtgcatttttgtaaaaacagagaagtcagagccccattctaaacctcctgcattagaagctctgcaagtgacacccagacacagtacattttaaacactcaggtgattcttgttcacagccaaggttgagaaccagtgagttaaggcactgagagggaagtaagtaaggaaagctggtgtgcgtaagtcattctttcactaagtttggcaggtaaagaaatgagtgaattaaactgtaaagccatcaaaagggtcaaagaagatgtagaagttgtaggttgagataaagaagcctatggggcagaaaagattaaatatgcaagaaaggtagaggaaaggggaaggaaagaaaggaacttgatgtttctagactttgttagatggcacacattttacatatgccatcaccattattattcatttgactggatttttgaggcacatgctactgtgtccaatttacagtgagaaaccaagaatagcaaggacctaacccagtgccagtgctgggctcttcctctgcatcaggctgagaagcaaggtcttggaggaagtaaacggatatggagtccaggactcaggtagggagtcagcttgcaaaggacgaacacgtccgctaagacagagatgcagaaatgaactagaggaggacatcagtaaagaagctgtgaagctggagcacatcagtgcatagagagaaggagatagtcaaagaaccactgtggggcagaaaaggaaaatatagtggctcactgcggatttcatcatctcaggaaagctggggcaaggtaactcactgacaatgagtacccgtggctttgtgacagtgcctgtgtgctacacaacagagcagaaagccagccctgcccttcttaccagtgaggtatggattagccacgcaacgaccagtctgtaagccaggagtacagacgagccaagctgcctgcagctgagtgggaaccacaaggaggaaaagccaagtccctgccttctaagagctgacagtctggagttacccagagtgatcttctatttcactaactgttaaaatagtctgattagaacaactattgtagaattgagtgaccctttgctttgcaaaggtcatatagaaatattctgccactgaggatctcatgtcgcccagtggttctgaaaataaatagaagttgcgtaccttcatggacacccatgaatgaaagtaaatataccctaatcatcacaggaagcatgtgcggtctgcacgtgaaagatgcatctcccatcagctaacagaaccaggtggagtctatgttttaataaggacgtgttattgatcgggaagtattaggttattatgcctaggtagttgcttctgggattccagtccaaaaggatcaccaaagcatcatgggattttcaatggcttcctgtggcttggcaaatgctcactgctaactgtgatttcccagttatccagagtagcagtcaaatcaaaggggaaagcctcatgtttcaataacttaaaacaaaacaaaaaaaaaaacggccaggcgcagtggctcacgcctgtaatcccagcacttcaggaggccaaggtgggtggatcatgaggtcaggaaatcaagaccatcctggctaacagggtgaaacctcatctctactaaaaatacaaaaaactagccggacatggtggcacgcgcctgtagtcccacctactcgggaggctgaagcaggacaattgcttgaatccaggaggcagaggttccagtgagccgagatggggtcactgcaatccagcctgagcgacagagcgagactctgtctcaaaaaaacaaacaaaaacaaacaaaaaaaaaaactcagtaaccttggtttaaagtatttccttggtggccctctgggttgtgtaacaatcggatgcattaattattatggcatcaaatgacaccagcaacatacatagtcagaaataactatttgattcaggcaggtgctattatttgtttcagcactgttaaatgtggggtttttgtttttgcaagagaaaaggcggttgtgtgtggtttcaagaagaagaaaagtcagaacaacatgcagcccattagaaaagataaattctttatttgtggaaaacaacagaagtggggctatttaggcaccgccaatgtttattatattcatatggcagagaataaacacagcacactagaagtttgcgctttgggtattaaaaaaaaaaaaaagcaaaaccttcttaggtcactgactatcttcttttgctcctttctatctgactcctcaggcaaggtgcaattcaaatccctggagaacctctcaaatatagctgctgttcaatgttactcagaaataaggaaagaaatttgacacggagacactccacatcttggctgcctggaaaaatatcatctttgaggtcattcaactcactaagtcatttttattattgttttgtctgtctattttctggtacagtctcaatgaaagatatgtggccctaatcatgcaaaaccgatctggggggaatcagttgtttcttcaggtcttcgcaggattccagctcccccaactacctccgtcgccttctaaaactggcaggctctggacgttttgcatgctgaagaaaatcactgttttgcctccagcaaggaacataaatgttgcaacactgactcctcctctcatgaagaaagagtgaacaagtgcaccgagttgagcttcttctcacagagccaccgggctggggaccggggagcggaggctgaaatccccagacgccggttttctgggctgggctttctgccttactcactccttctccctctttctggattttaccgaccgttcgcgaaacagctttccacacaatggagcttcatgtcctcgtgcaggaagtactcatcgactgatgtggcagactttgctccctggcaaaagtgagtacccatggcgagctgaggccgcctccgacggcgcgcggcaggggctgcgcgggcggccgctctccgggatgcgggttcgaggcccgcgtgctgaaggggagagcggggccaccggcgcgggctcctggagagaacgccagccaggagccagagtcggcagccggcggggaagcccgggatccgcccgcctcccgcccggatgtcccttctcagaggggctaaaaaatactcttaaggtgctttgcctccaccactgcccccaaccccagcttttacaaactgcactcggctcgcattcgcctttgtcaaaggcatcttcacctgtatccttgagcatgagtttcggcgttgattgtgggattctcagaatgcaaattatttgcgtcaaaataaaaagaaaagaaaaaaagagcggggagggggaaggggcgcagacaggtgatgtgatgaaagccggactcgagactctcccatcagcagcagccgccgccgcagcagcctcgcgggcatccggcggggaaagtttagggttagcaatgctgacctgaaaggtgttgctcctcccaaaagtcagcgggggtaggggcagatgagcagcctccgggccagaagccggagctggacggaggcacctaggcagaggaattgcagcccgggaggaagctggaaggagagcccgctggagaagggaggagggaagggaagaggagttggttaaagtcaggcaaactcaggtaactggagggccggcccgagtgctacggcaggggaaggcaagggctggagttctggctctttgagtagaaaactatccttttagtgacctctacctgtatcctggggaagcaacccacactgccctgaaaacaagcaacgtaggggattctatgactggacttgaaaatggttgcaaaacattattattagtctggagggatcactttgtcttcatttgtcaagttgaccgggcaagatttcccacctgaaatcgtgcttcacttgaccagggaagtgctgctaatcccaatcctgaccatcagctgtgcaaacttgggcaagaaacttaccctctctgggcttcgattttttttctgcaaagtttagggaattaattaattatatatatatattatagaaatatatataatatatatataaatgtttaatgaggtggaagtgctgaatagtgcaagagaggagcagatgaaaatattaatttcagtggttcttaaaaattaggggtgataggtccttttgagaattagctgtgagtcctcttcctgggggaaaatgcatatggcatgtacataaaattttacatgcaatccctgagggtttgtggatactccctgaaagccatgcctgaatcccaggtgacaatcccttattcctcctcctgtatcaagaccacccagccaactccttgctgctggttgggctgactgtgggagtaatccacagccttcttgggggtctggagtcagccacgctgctgaaggagacagctcccctgtcatgggtgagctccccacatgctctctccagagctctaccagcctctgactccaggggacccctcctcacaaccctttttaatgactctcctaaggcgacagtccttacccctagaattttcagtcccaccaaccctggagagccatctaaagaggatcgctgtctgaatcagagtgctcttcaggtcacctagctggatggcagggaggccaaggctttgtttggaaatgaagcagtctttgctccctgaggcatagtatgagtaggcagccatattcttttgaacctctgtactttgcctttagaggactaaggactcacatctctggggaccctgggtgttccactagcagtgccagcaaggcacatcagaaaacacacagggctttggagctcaacagactgggcttcagatcttgactcccacactgagcaagcctctgagttttcctgagcttcacttttcctgtcagcacaatgaaaataatgctgcttttttttttttttttttgcatggttgttgggagaatggaaatactatgaatcatgcctagcccatagtcaatgataaactttttcttaatattaatgtggcaccataaataagtgttcaatagtctcatgcttttaagaacagcttactctctctctcctatggggcttacattagtagaagaatgagtaaaattagttctggtctagttatgcacaaaaaggagtggtggcctcagaatacagagtcagactggctgttcgaattgtgcagtgtcaaggagagcactatgtattgccggcaagtaaagtatgtccagaccggcgtggatacttgacctgtctctcagttctcttttgacccataatcttgagtacaaaacagctagtgctgtgcctgcagctaaaaacagccaggcatggaaagaagtgttgtggctgggtccatcttcagaaactgtagagagaaatatctccattgtcatctttcacagtttggcacagatgtagccaactcagcatgtactctctctccatggggtcctggtgcctccattgcaagtggtcagatgatgtagcaatgaaagaaggaaacatcggaaacttaaaaggaaattggatatccacagagtagccaaagatctatcagtatactttggtgaggtattcctgcatgcaaagatagcaatattcatgcctactatttactgagcctttaagatgtgctaagcactttcacacattgcctcaattaattctcatagcaagattgcagagtatgagttatcatttaaagctttaccagtaaagaaactgaaacatggaaatgtacatacaccccccaaccccacaccccacatccgcctagctcaggaaaggcagaaccaggatccaagcccaggtctgtctgactttggcacccactctttttccactacccagtgctcccaagctccccaatatcaggcacttgcatcagccaaccggattaagattcttctaaaaggcaggaatagccaaatctagtgggtgcttttaagtggtgtgaacatgtgcttggcttgtgatacatattaacgggtagcaacaacaagatcacctatgggaggataatattcctgacccttcccaagcccagccattagactcaagattggcaatatccaacattagcaggtgaggctggcgctctgtcactgacttccttggtaatccttttagttaaacagagctctggaatgttcattctctaccacctttagaatcagaacaccacttacctttacctccctgtgctgagcacgttttcattcatttattcgacaagcatttgctgagctctgttttgtgctgggcacttgatgacacagtggggaatgagacacacaggatcccagcccttgtggagcttctatgccagagagagtgacagaaaacagtcgggtgaacaaatacataaataaaatcatttcagatactgataaatgctatgaagaaaatagaggctgaaggctacagagggacagggcgtgggagcaactttcaacagggaagtcagagaagactgccatacaaaggatacccttgaacttaaacccgcattttcaaaaagggagccagccctgtgaaagtctagggaaagggctaccttagcagaactctcaagagaaagttcttaaattggagtaaatgaagcagtaaagcttaaagtctgaagatgggccctttagaagttgacttgtatatagggggaattattatttgaatgcctactatactattctaagctgtgctgtatactctgtttatcttcccaatgatctggtgagttagctatttttgtttttattttacagttgaagaaaccaagagtcatcaaggttaaggagctagtccaaggttatggagctagtccaaggttatgaagctggtatttgaatcccttagtctatttcactccaaagcccacaactacttgctaacacagcatgtgggctttgagataatgtcttttggagaaagtaaggaagccgatagaaggagaatatcaaaagtaaattaagtagctgaatgctgacaacgatttgtatttgatgtcccaaattccagttagtgcacctacaactgaactgtccaatacagtagccactagccacatgtgcctattgagcacttgaaatgtggctatttcatattgagatgtactgtaaatgtacaacgcaccccagatttttaagacctagtattcccccaaaaaagtaaactgtcttggccaggtgtggtggctcatgcctgtaatccaagcactttaggaggccaaggcgggtggattgcctgagctcaggaattcgagaccagcctggggaacacggtgaaaccccgtctctattaaaaatgcaaaaattaggcaggcatggtggtgggtgcctgcaatcccagctacttgggaggctgaggcaggaaagtctcttgaacccgggaggcggaggttgcagtgagccaagattgcgccattgcactccagcctgggtgaaagagtgagactccgtctcaaacaaaaacaaaaacaaaagtaaactgtctcaatttttatattgattgtgtgttgaaatgataatattttaggtatactagtttaaataaaatatattaaaattaatttaacctttttcctttaatgtggcttaatagaaatgtttaaattacatatgtgactcacatgatatttccgttgaacagcactgatctagactaataagttgacaaatacatgataggacctttttcccccttcttccaaacgtgacttcttcctctgttcttgtgtcaggctccttctcatctgcccccatattcagttatttggtgaagcacgagagaaaagaggtccctcttccttctcccccaccctcatgctgctggttagcaggtgatcatttgaagtccactataccatgtcactttgggatctgataaaatagactcagtgattatattcatcaccaagaccaatcctctcactcaggtaaatctcaagaggctttcaaacgtcctacaatgaaagggtcattttaaatctggatttaaagttttacctttaaatcacttcctagtacattgtctttgtagttttgggcactttgtaaaatcagacgaggagacaactagagcttcatgtttttgtgcaaagctcattaaataagtaatctcatgcagtaataaatgtttctccctgtcctcttgcttaaaacagcatgaacaaaaagtagtcccagttgccagaagggctactccaggggcatcacaaaagaccacctttggtttctttcttttgtccactagctaaagtggccctcaaatatgtcaatgaaataaagatatattttttttcctgcagtttcatttatttcaaaaaaaagagcagtcagattctggtattgctggagaaagcctctgaagagcaaagacctggattctgcttttgtgtactctactggtttgcatgttaccctctctctcccttttttcccccaactttctcccttacttcctgtagtaagtttggtgttgatgagataatgccacaaaaaatgctaatggtgaaatgtgctgtacaaattggccatggttatgattgataacctgaatacaaatggcatctctagacatgtgcctgcagggaggagttgcctttatgtagctggagcaaaacattatgtaagattctcttggaataacatttgttcatttccacttgaaatccaaatctgggggaaatggcagtaaagaagctgacaagaatgaatcttagtgtatctgtcactggtagactgagttctttctctagtctgtataggttccagagagagaacacccaattgaaaaaggacaagctggttttattcactggccagaaatggaaaatgagagacctcttgctctaaaaagtcaccttctccctagctgtgggaagctgcaggattgtgatgagttagatgtggggcggggagctatgtaaacacatgcagggagaaagtacagaggcacagacacagataaacatgtttctccatgcgtcctatggagagaaaatggcggcagttttcttctagggatggggagcccagcattgtaacgctatgttaatgacctaaacggaacaaggggtagccagttctggtttgcactggtttcctgcaggcctcttgtatttggcaaaggatcaccaagctcctgcgacatcccaggccatctggagttctttaagcaagagtatctatagataaagaaactagggaagataacaatttaagaaaataatgagctttcccagctatttctctagggctgccctggtaatatttctacatcaacagcaacacatatttttcagcattgtgtaagccaggaaatctatgctagactccacggggaaaatagaagaataaaacatggttcttgctctggaggagcatagttcctagttgggaaggtggacagaaacataaaagaccagtagcatgtaaagaacattttctaagtgttacataaatgatgcaaacaaagttttgcaattctggagggcagcatgcccataacctctaaggtatattaagaaagacaaagtagaaaatgggcattgagggctggaagcctaaagacacaaggagagaaggagagagccacctcacataagaaaaaatgcacagtggtgtggcagtggaaatgtacatgggttcgggggtgcgtgatgtggaaaagaacagttggcttaatccagtggctccagatctgagctttacatcagaatcacctgagaagcttttaaaaattacaaatgcctcagccccactccagagcttccatttaattagtttaagactggggactggtctcagtggtgtttctgattgattttgttttgtttttgtttctgtctcaatttcccagaatattctaatgtgaagtcagagttgagaatcactgagcaaaaaccaagatttttatatcatagtcatgggacataaaatgaaagaagtaatcttttaaaggagattaaatggacaaccaagagtgtgacctttaatttgtagaaactgtatatacatgcacatttgtatgtagtcttttaaattcacagataattcctcgtggtgattctgtctacttggatgatgtggctgaaagcctttgtaaccagctgcctactcttgtcctctgtgtactttgggggtgtcctatagtggatcctagctaagtggggcacaatgggcatctcacaggagcttgtttctaccaggctttttgtaatcattgccaagggctttattatcatgcctaatagtgcccacagtagctattttataagcatctgcaatcttccctcacctctccaactttacaaattgagaaatggagtttaattacttgccttgggccaggagactagctggtgatgaaggtgaaatgagaattctcagggaggtgaaattagaatttccagctactgaattccacataccttattaaactcccaaagtgagtctacccactctcctgttggtgttagaatgttatttcttacatgaatgaatcagtgtcacagatcagtaggtgaagatgactggtttccctaagctgccaacactgtgattatctgagtgtcaatgacccataggcagtcacagtggtcccgagagccccgtccctgatgcctgggagctctcagtctagtgaagtttggccttgcatatttatagtttatccactctaacatctgggaagtgaagactctggttgctattccactgctcctagccccacactttacggctgttctgatttcccttctctgaagctcttgttcactgaaaggatatcagctttttgctacacccctgaaaaaaagaggagaaagcccagcattttaaacagctgcttttttttttcttttggatggagtcttgctctgtctccaggctggagtgcagtggcgcgatctcggctcaccgcaacctctgcctcccgggttcaagctagtctcctgcctcagcctcccgagtagctgggactacaggcacgcgccaccaagcccggctaatttttgtatttttagtagagatggggtttcaccatgttggccaggatggtctcgatctcttgacctcctgatctgcccgccttggcctcccaaagtgctgggattacaggcatgagccattgcacccggccaacagctacattttaaagaatcctttatatgtgttgggagcttctgggttcactgcccacggtgagactaggggtggggacggaggttcttctgaaggacagtgcggggaaaaagccagagtcttggcaatacagcctctttagacaaaaagataggtcaatttgtaccattcccaaatggttgggttttcttttctctgtctcaaaatccattactgatttaaaacaatttccaaaagctttagcaatagcaaaaagcaagcctcttaaacagtgttgctccacactgattgcacgtgagaatcacctagggagctttagaaacaactatagactcactgaatcaatattctgggaaggggcctggacattcgtatttatttacagttctccaggtttataatgtgcatccagggctaagagctactactggtcagctatgatccaaatcttaattacttatttgtatttcttcttttgccttgttttagagtctcatggcccagaaaaccatcaaactatatttttgttgagtagcaatttcatcattctgttctttaaaaaacatgattttgagcataatttaagtttgctacttctatagagagacctcacactcagtagcctcatcactaaaattttctgtgtgcaatttagaaatcacattgccagaagcttgctaattaattatgagactgaaagataaaggttaagctttcctgccacctatatattagatttcccaattgctatgttaatctttagttaaccaagacttgctttcttgtctcagccattttaaagccaattaactctgttcctgttcacacccttattaaaaatataattacagcagtagtctccagggactgtcattgggtaggctttaccaaggtaaattagccaagaaataactaggctgtgtaacaccctctcagaccctggaaatcattttggttgcagaagctacttagtatcagagtaggctggggtactcataaatttggatttggaaaaagccaattccaagtcatcctaaatgtggaagaatctgtgattttgagaatgattctggaatcagttatccagggtccagccaagtctgatacaccgatcctcagaaggttgtattaataacaaaaagaaaccaggtttttgtattagatttgatggaagaggctgggggacagaaggtgatgtagcattttgttttctggggtgctgagattgtgggattaggagaaaataagaaaaaagattgcaggggagaacgatggacagaggcctcctgttagtcaactatcatgggcatcagaatttctttattcactcaactaatgtttatggaggttctgctttgttccaaggacccattataggagctggagatagaaggatgaagttcctactctagtgtagtttagattccagtaagaggaaacagatatccacactaaaaacaaacaataaataaaacccaataaattagtcagtactatgaaaaaaatgcaatgaactgaagggaatagagtttgctgaaggctgctttcaatagcttgtacaagttgcactgtctgaggaggtgcccttcaagctagcacatcaatactaaaaagaaaagcatgccgagagctggcagaaagaaggcttcaggcagaaagaacaacagcaaaagtcctaagactggaaaaggtctgagttgttcaggaaacagaaaggagaccattgtggctggacccgaggtaagaagcaatgagggaaaggtgggaaaagagcaaggagggcccgaggtcatgggatggagttaggctgttaagtgctttgagagcctaacatcctaactcattgggaggttttcagcagggtaggaacatggttggcattgcctttgagagctcttcccagcttctgtgtggagaatggcttgaagactgaaagcagagggtttgtaggaggctgatcggaagtacaagcaagaggggagggtggatcatgccaaggtgacagcaagcaaggtggaagaggtgttggattcaggatggaatttggaggtatggccagcatggctttcagatggaggggaccagcgaaagtgctggaaaacctagtcctgctcaagatgattgttcctgccctacccttgttttagaccccttgttttgaactaaaacagaataatatctagtgctatttaaaaacattaggaattttaaccttaacttgtttaagcagaacaaaacaaatccctgcctggggagaaacttctgtttgctgcttttgcctcttaaccataaaaatttcatcctgtctcgtaagactattctgatggcttttgttgtttttgattactgtgcttttcgtaagtgctggaaaggtcacattcgcattactagtttatctcttttctgagtgttttgacactttggctgtgtttaccaaggccttcctgctgtcagacatttacatggggctttctacagttgatcagtttctccatataagtgctaatataatcgcaagcatttagtgggcactgactgtatgcaaggccttgttttaagaatttcatgttttaactcatttagtccttccagccaccctttataataaaaagtgtgtactcttattatcattttatagatgaggaaactgaggcaaaaaaagaggttaagtcatatgcccaagatcatacagctggtaagtagtaaagccaggttttgaactgaatccatctgtacagctctgggttcctagtaactatgttgtgccacttttctatgtaattgaagctgccaccttcagaagtagacttgtttctcctgcaaaaaccccaaggtaccactaggagacactaaaactgggccgggcttccgggagttggactggtggggagatggcataatctagaggctgaatgatccaacccccctccaggaaggcctcacatctaaaccacctgccatctgccaaggtgggaggataaaccaccccccaccccgccgccaacagggcactggctggtgaaagttgccaataccagaggagtcttgatgaaatgccctctcttttcctcaaactctttctgcctactattcatagtatctgtgttgtacccacccacctgccacttatcaaagactgaagaaaccaaagttattcaacaagccatgaagcaaattctaattgctccccacggccatctgaggctggcctttggaaacttaaaaaaaaaaaattaaaaaaagagagtcatattaatttatttgttaccacattatttgctttaaaattctggtggcttctttccagtgttttattagtagaagcgaaataagcctaggaaacacaatatttcattctgtcttctctgcttttcactgcatatctaccttcaaaaatgtcttctctcaagttacttggtttctcaataactagcgtgaaagtaacagaccttccttccttcctaatgatagtaacaacaagggatttacagaattgaagtttatataaggaaatgcattaagattttaacttaagtaagtgaactattcagcaatggctataaagacagtaattgtgatgatttgtcttctatattatatgtttaaactagttatatattttaattatataagatgcaatttttttgctccagtttccatagggtaattttcaacagagattaacatgcgttcattggaagtgttgaatttacctaatcaaatcatcaatttgtttattcaactttaattttcaaaaaaatgttattttaaaatattatatgatatgtgtcaggtatttcttacggttgacttccaaatttaaaactgcaaagaaaacagaaatccatacatatagttgcagtaaactatactcaattttggaagattgcagtggcaacatcagtgaattaaagtttgaaagctatttcaaatctttgcatattctccaaataactcagaatcctacaaaaagctaaatatttaaaaaaatttatcttcaaaccaataatgtaagtttcttctttattgggatgattttggttaaatatttagcagaaagtaagggtgaatatatatttgatataggtatgtcctaagctaaaatcaagtcatttaaagatcagagcaattaatggcagttatgtgatcacaggaatcagtctatctcctccctcagggtttgattcaatgagttttatttttctcttagcaacttttcttattttacttttcaaaggacatcattgaaaccataatagtgttcatatctgtgacttttaaatttttatttatttttatgcatggtttaaaattcatttagttcatttaaaattcaaagatataaaagagcattcataaaaatgtccccctctcctgtcctccagcctttacaaaaatataccatatatattaatatgggctaaatacccttttaaagttatctcacacgcaagatgctatgactgtgtgaagccggagcctacagactattgctgatcccccagtagtagtagcagtgactctttagtggccctggagcttcctttctaaactcaagtgtatatttaatgtggctatttagggatgaacagcagtattttcagagaaaagtatagaagaacagatgaaatcacacaagatgcacacatctgggtattggtgggcatgtactttcagcagtgagtttacaaataatctagacagagttaagtatcaggtttaagagtcctaggatctaagcctgcacgggttcagtcttctgcaggaacttgggaatgttggggttcacttaggcccccagtgttggcatgtacacccactttcaggaggctggaggtataagttcctctctgcatttgtctcaggtcatcacaggcctcagaagtttctcaacagaaaaggattgcatgggttggatgtccagaaggatacgtggagttaaacatcagtcagtggagctagaggcttgctaagacttgggaagaggatgagggaaggcaaaacctgtcacctaaaggggaattctagaatgtacttactacactcatgacattaccctaccaccttcatttatcaccttgtgtcaaacatagacttcttggtcaagaccactatgctgtaagctacctgagggcaggactatgacttattctcctttgtttaccctgccccagtgcctaacagtgtctttggaattggaatgttcaataagtgggttaaacttttgaaactgaatatttcaaataatcacagataacagatggttaaaaaccaagtccttctcagcctaactagtgccaaaccaaatcattgtccatgtctcctaaagaaatgaaagttttctaattacctatataggtctggactcaaaactataaggcagcacactgtctttggtgttgacctatgtcccaggttgtccatggtcatcacacactaatgaccacttgtatgtatttcatctagaggatcacacagagtggtatgctaggcccaaggaataagtttacctgcttatttcacttctccactgtcatcctactgtgtttcaggaagaatttcttttacctctgcttactctactaagatgccccacataagcccccaactccttttcttgtccccctcccactttgttgtctattttcttctgtcagaccccttcctcctccaaactgaaccttcctgagaatataccaaagaactcaataaaccattcagcccactatagttcaataaatgagcacttccagaatttgcattttaatagtggttcaacctcaagtctctgttggtggaaatgtcactgtgatctaggtgagggaaacattttgagagcctgtgggaacctccaatagcaccttatagtagcttcttctggtgcctgtgtaatactacaatttccagaagccttgttgatatccagctaagtgaaaagaaagtcctcagttccagagttcttacttctatttcttttttttttcttttcccttttgtttttttttgagacagagtctttttctgtcacccaggctgcagtgcagtggcgcaatctcggctcactgcaacctctgcctcctgcgttcaagcgattctcttgcctcagcctcctgagtagctggaacagatgtgcgtcaccaagcccagctaatttttttttttttttttttttttttagtagagacaggatttcaccatgttgaccaagctggtctcgaactcctgcctatccacctgcctcagcctcccaaagtgctgcaattacaggcatgcgccaccgtgcccggcccttacttctatttctaaatagcaatggattccactcttccaaggacccagaacttgccctaggggtgagggtcttttgtacatcttgcaactgagaacttttgctagaatcagacagacaacatagatctcagctctaattttccaggagtgaagctgtggagcaagtgagttacctctctgtctcactttttcatctgtacaatgaggctactaaaacatacattccagggttgctgggagaaaaagacaagacaaggtatgtacaacacttggcaccaaggaagcacacaattcatgggagtaattactatcatcctcaccaagagttcatgatttactgggggacaccaacacatgtacagtcaacagggtaaaatgctaagggtgtggggcaagtgttgagtctgagctcagtagaaatttatgagcctcaaaggccctaaaacatccttgaccactcagttctatttcacacccttcttgtacttcaccaacaaaccagcaacatgcttctggttggcagcccttataaaagaatttaccttctatagtcaagtccaaagctcttaactgcttaccacatgacagccaataagacaagatattggggcaaggaagatgactttttttcagggagccagcaatcctagaagatggcagactgatgtactaaagaaccatcttaagttgatagattgttaggctccttttatgttaggggaagggggaataggtagggggttaaggtccacagttgactggtgaccacaggcatctgggcatcagcagggatctaggaggttgcaaaacttctttgttcatggtcaactattttccagattgaccttgtttctataaatttttaagatggcattgttatttgtgtgcatactttctaatctcctcaggggtctgtttcaaaagagagatggtcattagttctgaagttaaactataatctaaattctttccatcattagcttggcctatgtataggaatgagcaaaggcagttagcctgtgaggttagaagcaagatggagtcagctatgtgatatttctcccactgttacacatctctgaatacaagaggaatacatttcttctttttgctgtgtttgcttcaagcctgtaccactgagaaattgggtgatccagggaagttttacttctcttgaacctcaggctctatctttgtaacaatggagaaatcaatgcctgcattctaggcccttttgagggtggaggaagacaatggttgagaaacttctcatctatagttgatcctcaatgcgtttgccccttttcctgtggcactgctttgtatttggatggttcgagcagtgcgtcacacatggaggaaaggcaatggaatgatgacaaatagtttgttgatttggtgctttgtacattcacccacaaatggcacagtttcagggccactgtccttgccaaatactatctgaagagctaggttatgagcctttggaacccagatctgataagcatggaggaaaactcctcaagggagatgaagctaggagattagcagaatatactttctccatttgtcccacatttgatgccagcaggcaaaccagagccagctgggcagtgtacaattcccagaaataaggaaagggtagaagcacctgtttttcctctagcaaaaccaaggcaaatggaaaagctcagaaatatatcagcaccattagcaagaggcacaacggggaaggctggaaatgtgctgaggaaaatcacattgccggtcaacgcatagctacctgctggagaagagagtctgcagacacacctcagcctggacaaaggcctccaggaccgggagctgtgctctgcaggaactgggccccaggcactgaggactgaaaaccagcccaacaaagcatacctgtttccatttgtgagagatgaaatgatatgggttttgtgactcactaaaccacttggaaggccaaacaattacaaaagcaagatgcctggcttcttctagccacatggaggggccctcagacttgagtagctgtgtgccacttgtctggggtggctgcaccaaaaggaacagtgaggtttagatgcttgttattgttcattgttcagttttggttctgtctatttacttctaattcctcaaatattattgtgattagtggtatagaaaggaaacgttcatttgtgagcaaagtgtgtaataagaatttaataatgaaattcccagaaaaaaaaactcagatagctaaagaaacagcagtaacatgagctccaaatatcttgagttgtattgttaaggtgagaatccataatgtaaagggaataatgtaaagggaatgctttgaaatcaaaggcataatccaagtgtgataacctaaaaggttgtggatttcttttaaagtagaaattacatgtggctttgggaaatcatcagctgaagcataagctatgcttatggattctcgctgtgttgtcactaagaccgattatataaagacttggcaaatccatgtacaaatgtaaaacttcccacaatggtatttcatggggatctccttttacaaagtggtcgttgatcaggacatttttcactgatatattcctttggaagcaatgaattttagataggatatgattattgtacaatgtgataggtagctctgattattcaagcagctagggcattattcagtggcaaagcattaagctactctggaatctttcttctgtgtaagcaggcagctgctgttgagactttctctttgtgggtgaatttgcccaaccaatggcaagcattcattgggagtaggggaatgacgctgatcactgttaatgacagttgaaaatgaaatgctttaatgaatctcatacttggacttggctgctgagccagagccctgtacttgaagagcttaattatgatgcctcaaaatttagatcttgaccctgaactgctatgacttcctcccaccctcagttttgagagaaactttaaattcgctaggggattcaatgttttacatgcttggttatgcaaaatgggaacagtagtgtccaaacaatggaataggcttctatattattattttcatttaggcagtataactgacatgattaccaaagtcatgttatagtacatgtatacaaattaatttcataccgggggacttcactggggggaaaaaagggaagtccctatttgtgaaaactatgattttggtttctttctgagtaaagcactgctaatctctttggtgtacaggaaagtatggtattatgttctaaaaatcagaagccccagaccttaatttcaactaatctgatgacatcattttgtactcagagtttcatttcccaacaatttcatgtttcttagtaggtggggaacccagaattgaaaggcatcaaaaacagctaaatataaccaaaaacctgctaactcaccagctttctaaaattcaggaagtatctttaacttgattgctgaatctccaaagacatgatgatcagatgactggttaatgggtattttttcagactctacatgattatcagaaatggctgccctggccaattgtatacctacgaagaggtattatgtagaagaacttatattcatctacttaatgtggacctcaaatattaaggatgttcctaatgtgttctagaccggagtcagcaatacttttcataaagagccagatagtaaatatttctaggctttttgggccatatagcctctgtcacaattcctcaactctgctcttgtcacacaaaagcagccatagacaatgcataggtgaatgaatgtggctgtgtttcaataaaactagactctcttaatgccaagtatttgctggaataacacaaattaatttatcctcaaatctgtttaacctattaatatgtcagtcaatattacattaatattttatgaatctggtatcatattatacatgaatttatctgaacatttggttaattcatgaatatttactcaatattaatactacatcatgaatctgttatcaagtcatatacagatttcttaaaaaatttcccttatttagcatacttgtgaataacatcaataagcaagtatcttaagttaactatcaggttatatagcagatcctctcccccttttgtaactctttctgttacaagggattttacattattatggtattgggaagtaagtctatttatcctgtccctatctgtcttcgtattaaccatattctgttatagcttttatctttgcagacagaatagttcaaatcttcatgatttgtccttaaacaacccccacttcctcatcctcttgaacattttatgcctccatcactgtctcttcaggtcttgtgagtccttgaagtgcagtgactaggctggaacatggtgttccaggttggtcacatcacctcttcctaatgatgccccattgtaccttttgactatagcaaggaataaacaaagtcagaagtgtgaaagtgggggagaaattgagaaagtgcaggggatttaggggagagaaaaatggactacaggaaaagaaaacattgacttttgcaaagtgctctaaactggctacaaatgcattccgtaattctttaaaccttaattgtaaccgcagttaagctttccggtgtgttggaataagaacaaaactaaaatccttctttgtatagaaattatcctgcagtaacttagagccaatatctctagttaggatgagcgcagtggctcatgcctgtagtcccagcactttgggaggctgaggcaggtggattgcttgcacccaagtagtttgagaccagcctgggcaacatagcgaaatgctgtctctacaaaaaaattaaaaaattagacgagcatggtgtcacgcacctgttgtcctagctacttgggggcactgaggggagagaatcacttgaacctgtaaggtcaaggctgcagtgagtcataatcacgccactgcactccagcctggataacagagttagacctgtctcaaaaaaaaagaggaagagatctctggttagagtttgtctctgatggatactaaccatgcaagtagtttacacaaaccacattctttctgtagaatgagaaaatcttggatataatttagcataatgagctaaataactctagactgagcttcgctgcccagacaggactctacttgtgatctgggaagatctacccttgcactgaattctctcctcttctctcctgactctgtgagaaaagtttgcatgaatttactgagattagttatagaaggaactgtgtgtcattgaaagtcttgtacagaagttcacattaaaatatatcatagtcatctttgggaatgattctgcaaaattcataaaacaaagatctctgaaaccctaaggcacactgtgctggaggctaagggaataatagtgagctgagtggtttctgcctacacagagcttctaatatattgaggaaagagatctcaatcaaattcaattgcatttataagtatggtaaggacaacaaaggagagagacattattctgtaggagaataaccctgtcaaagtgatgactgatttaagatcaaaatgggaaggtaaaattttctcagtacctgcaaaggcactgaggtgggagggagcatgccaatgtagggaaatgaagaaacccagtgtgtatgagccaagctgaataaaacatgagaagaagctggagaatgagagagaccagtccccaagctctcaaggagcaagaggaagccttttcggcatttgaagtggagggatggcatgatctcgtgcgtagtttttaaaagaaccactcaggctactcttttgagaatattgtgggaggccagagtagatgcctatagacttatacagaggttaaggcagttgataagagtataaacaatgatggtagcttacctcacatgctttttagattataggctagaaggtggcccaagcccatataccatcatggcacagtgaatacgttttccttctggatcgtggaaatgaatattgtgccacacagcttgattgacactccccaatgacttttaatactgtgggatctctggcacatacttcagaagatgagaaaggagttttaattaacctctgtttaggaattccatagacataattttcattaacatctacttggtatttcatctccatgaattctttccagtgataaagctagttggtttatcctccaggactgctcagttctgaacagtgggtcttaagtactctttggatttctttgaaggcttttttttatttttgttgactacctctctactcattttgccccagaaaaaatgtagtcatttctttgataagtgaaatctaagaaaggcttatttcatttggtacattaaagagatggaagaaagtaactttacataagaatataaatgccagctgtccagcatattacagaatagatttctaaatttgctgaaaggttaggaaaatggattcttatataggcttaaaatttttataatttttttggcattctagaatgaaataaagaaaatcggtatcatcttgatctcatcacccagaagaaaaaaaaaacactgatacatggtgaaatattttcctctctcatttttaaaaagaatcaggaatagattgtatacatatttttcaaattctttctacttagtgttatatgatagtcaataatatatgtgtatgtaagtagcaataaatcattcctgaaaacttgttttttaagcttgtataacattccgtcatatggatgtactgattttgctaatttgttaagtttaaaataatattcattttcatttctttgactactaggtataattaattttttcatacactcactacccttcatacttcttttattgatttcctttttatgttaattattaagatttctatttgactctcaacattttcttaatttttttatcattaatagatgtaaaaaaattcttaatttttaaaaaataaacccttttcatcttaaagatagcaatctattttccataatacttgttataaatatttccccagtttgatgttggtcttttaattttgtttaaagtatttttgacaaataaataagtttttgtggcttgaagtttgttcatttttttcatttgtgattacagtttagttgttgattcaacacatccttattgagtgttttgtgttcagcactaagcgagacacaagaggtaagacagaaaaacaaggtgcaggtggttttgccacttagagattacaatttaatgaggggatagacaaacaaaaccaggtcattataaaatagtatactacaagctatgcaagaggaaatacaggtgggaagaagtacctgatctggacctgggggataagggaaggcttctggaaggaaacaaccttctagctgagaatgaaggaaaatggcaacatgaatttagagagaggaaacagtatgtgtgaaagtgttgttcagtgtcctaaatgttaaaggtcctctttccccagaacatggagtgtgtgtgtgtgtgtgtgtgtgtgtgcgcgcgcgtgggtgtgtgaaggagcagggcagggtggtggtcaagtgtgagcaggaggccactggggaggctgcggcagtccgagagaaagacaatgatgttgggcagaggatgtgttgaataactcatcccttttcactggacaagcaatgcttcagtgtatattaagttcttattcatagcataccgtctattccagaataatctaattagttttattgctatatcaattcttgggccaacaccacactggttttgagtttaatgaaacgtctaaactggtaatgcatgcatcctctcatcacttttcattttcaaaattgatttacctattcttgccaatgcgtcctcccaagtaaactctaaaataatttcaaaagtcacaaaagcatacgtgtgtgtatatgcatgtgtgtaaatacatgtatatatgtgtatgtgtgtttcttccaaccatttttcagtttttggagaataagatgtttttattcaagttgctgtcagtaaatattttatattacatgacttctctatacacacacacacacacacacacacacacacacaatctcccattggtaatttgattgggaatgtgttaaatcaggagaacagacattctttttaatattgagtcagcccatcaagaagcattgaatgttttcccacttactcaattcttttatacttctttttaagcctttatagtcttactcatataggtcctgcatatttattgacggggtattcttttttcttttataattttagcttttaattatgaatggatttttcttccattatctcctctctggtattactggactacaggataaatattaatgatgtatatttactttttatctgattatttaactgattataattaattataagtgttcatagttaattataaaagtttataatcatggtgtctttaaataatgataattgttctccttccaaaaattgcatctaatttttatttggtgtcttacagcattgatcgtaacttctaatactaaataacaatgataatagtgagcgtcctgtcttaatatcaatttcaagaagaacacctcttacataacatttttaaaagtgtgttatgtggaagctaataaaataaacttgggaaatgcgacaaatgaaaattctctctcccaggcattcttaattcatattaacatattaagatgagatctgcaacaaagagatgagttcaactgagtttaacccagtatttctaaaatgtatttgactatggaagtatttttccctcatttagaattttacatcagttatgacagtcaaaattatattaatttgatcttctttctttttttagaaaaataattttcatactttcttgtcttttctgtttgatctctcttttgccatatggactatgatttgggtttacttttaatttttttcaataattgagaagctcgtcacccttctttttatttctacaagtggttacacttaaagtttccaagacatttctatccatatcttatacttagcaaagtcaaagacatgaccatacagttttctaatcaacttcaaaatgaaatgttatctttgaataaccccatcaaaagaaatttaatccatttttacttccttccaacctttcctcagtattggtaagaataatttaacattttttattcatgttactgtcagtaaatattttatattatatgacttctcttttgtgaattatgtgatctgttcagcaacataatcctttacaatacattcctgagcagttctatggttatctgatttctgtgtccataactattgtctttttataccataaatttctcatttttttactttttaattttaatatcttaagattcgccaccttttatcccatttatccttttagggtgtataatgtaggtcatctacattttgagaagtgcctgattctgtttactatagtgtcagttttaccccttactgccttcagtggacaaattagtactattatttcatttctggctcctctacaaccccttttaatctaacccagcactcttttccttccttacttttatctcataatggctacctgtccgttttccacagtattttctatttcagttgaagatgataaacagttttctgacattgacattaagatgatgtttcagttttcttgttagacaattttgttcactgtctaagctacttatttttcatgattactcgtctaggaataaaaatcaatctacttagacccaatatttttgaacactgagcatatgtaatgtgttcttaaacctgttcaatatgtactgggctctaaatgtcctggcctacagctggagggcagaatgacatgtcctagttcaatatcagcctctaacaggaatgctactgatgtagttttctgcactgagataggatcttcttttcttccattgcctattctcctggaggcaaaatagagaacataaaaagtcatcatctttggtatgttcttctttaggggctttttctttctcccagcccaacccccatagtccttacttgctagatgtgtgttccaggattcagttcaccactgcccagtcttctaacatccaatttcattgttttctgagagttgagaattttcatacagatatagaagggatgctgtgcttgtttgaaatggttctatttggcagaggatagccgaacagtttttaggcaaagaatgaactgtctacttactttctttgaagaagccaacaatttggttttgttgccaacagcaaataatatattggctaataattgtggtttacagtgacatgggtaatgttagtcataacatgtcttccaagtttctggctatggactaactgtaggtcttggagtttggtattatctagaattttccttctccctcctcccccacctcttatcttttagcatagttgaagattggaacttcttcccagaaatctagcatcttcataagtcctttccggttttaagatttttatcttatattttatatatatattacatatatttcctgtgaatcttggctgaatttctcatttaataaagtccaagttagtatgaataaataacatgtttcccgattttacacacatacagaaattcaaacacataatgaactctctggcagcctttagcatttgtaagtgctctctcaccaggaaaatcctttaatagataaccaagtgtcctggggaagaagggtgtcaggaaacttattatatttgtgtcactttcttcaaagggtgattaagtatatgtctccaaagatgtgatgttatcatctttgagtatcacttgaattcaagtcaatatttattgagaccccatgttgtatcaggtgccttactagaaagtcgacatatagagatgcataagacatgatctttttcagtgggtaatttaaggtctttcttctactgctagcattgtcatgtgtaaggctggtgggttgagtctttggaatttgtgaagattcttccaggttgtttaaaaaatcttttgattctcacaaatgtattttttctatttcttagaattatgttctttatggctaccaggaaatcctttgaaactggaattagattgcattattccactggggtaataggattggtaaggtaggagtgtctttgaagaataatgctaaataacccagacactaaggctgaatcttcagcacagctcttaaggcatcctgtaagtaccctctgctgcttattagaaatcccaaagccctgctcccttaggaaagcggcccatccccatcctcatcataagatgcaaggcatagctaaacatctcaacttctcacttgagtattatatactctcaggccaggatactttccaactcaagagtaagataacattacattctgatcttcttgtgtgtgtttttatgttttttttttcattttatttattatttttttttttgagacagaaattttactcttgtcacccaggctggaatacaacggcgcaacattctgatcttcttttgagagaaaagtttcacacaattagcctttgaaatacacattcctttaagtaccatgaaaacattgtcccatacaacaatatttctaagaaacacacatgtccctcccacaatgattttttcttgttaccaccaataaaaattagagctgtgttgtttttgttgttgggtttgtttttgtttttgttttttggtgactactgtgaccctcaaaaaatcaatccgactttctcgatcttgatttgcaacaccaaggttaccaaacaaagagaatggttcaatgagggaaagctcaactacctgccctaaatatttagtatagcaatgctgagcttttggtaatggctcaaaattctcatgctttcccactaaatgaaaaggggagctttgctactagtaaaccatattcaagaaataattcttattaatactttgcttctttcctatgaattattgctttgtaatggatgtttgacaagttactagcaaagcagtcttcgatgagcacagagacccatcagatctgtattaacacctccaaccactggagtttcattaagtaggtttctctacccctctccttcaggccacagataggaagaatgacattgggtccaaagttctggcacaaagaatgatgtctgccttcctgtgatgatttcaaattcagggtaataattccaactatctttccctggccatgatagaaagctcaagaaatcttggttccttgtctcttttcttccatccagttggtctttctaattacacactcaacacaatgttctgctgagcaagacatctgctgtagccactatcacccttggcataaccagatatttaaaggtacctaaaggagtttagctatattttgccaagatcctaagttctatggcataagaatccatccacttctctattgcctatagaaaaggacagctcagtctttctgaaagaattgttctcaaacaagaaagcatttgaggtaacatgtcaacaaggtggactggtaattggtgttcctttcagagccagttggaggaaatggccagctcagacattctcttctccccagtgtcctatgggaacaagatttacccagacacagctgactatgagaagtcttcagggatttacaacctgtctaagaacaaggccaatgggggactcactttgcaacacgtccctatttgattgtcagaggacagatactctattaacaaaggaatttgcactggtattttcagggacacatcaagtaattgccacttgaacgtttttccaggctttcaaaggaatgtaagaatggcctaaggctaaattacattcatgtctttagtgagtcattatattactggcaataaagtatattattactttactttcagatgccctcacatatttttttaaagtagaaaggagacatattatggtcaccattcttaagagacttaactaaaagacactaatttaatcttttagttacttaaaaatagctgttgctcacccactatgtgccaggctctataccaggcaccaatatgaaaaggtgagtattctctggtctccctaagcacagtctagtggaggagacagacaaaatgcagccatggccagaagggggagcagttaatgaacaagtaggcagagagtagggaggggattctgagagacagtacggacggactgagggtaagttgtacatccctgatattttgggcaattgcaaatagtttgatgaccaaatcacaaggagaagaagtgacagcaagcatggctgaaaatgtaggttggtgtcaaattgtaaaaagccttgaatactgtgctgaacggtttgatccgtgaatcaggtagaggacttgactcaggtctcttgactcaaaggtcatgttttttctctgctagattgcacttatccttccaaatgctagtggacaccacactgaatttgatcaaagatctctcaatggaaatatgtaaatttcctgtaagaagcaattggtaggttctcttattatcatctccatctcacagataaggaaactgaagtataaagaacttgagtaacttgtccaaggtcacacagctagttaggtgatcccagacaatttggctccagagtcactagtcctaactacaacaatttagcctctctttatctagaggtctttatgcatttgtctgcattctacttacgttggtattggtgagtaaagattcccttccagaataggtttgataaattgccaagtctgaaactgaaaaattaatatccatgataacagaggttttggggtcaaggagtgaaaggaattcatcccatcctgtctctaaatacttttttctttaccaatttatgggaatttgagaccagatatctggaaccaagcagcctcaccctattaagggaaagaaaaagaacagaagaaaagaggagaggagaagagaagagaagagaactaaaagtatctgcaaaaatattaaaggatttgaccgagatctctgagatgctccaaagattgcaattgtgcttactatccaagttaatggctgtaaatctaagagaattatgatgtgcctggtaaatattggttgttttgttttaagtcttcatggagaaaatggaaaagacattggcatgtaggatgaagtcacagcaggacagacaggtcctgcaagtgtttctttagatgcattgatattcataacatccaaacaggccttaaggctgtcttcttactttacacttaccaaaggggtaaaatatcattttccttggacacacaaataataaacgtactctcacaacatcacttgaatgttgtggttttgcaaatatactatgttttaaaagctatagccctcaaatcccttactagacatcaatatttgttggaatttcaacatcaaagatttattgtgaagggggagggggaggagttactccaaaggctagaaccagtgcatataccataataacaactctgcatgcattattgcttctaatcttcataattttgagtactatctttattgtcaccatttaatgaagatgttaaggttctgggggcttaagtgacttgcccaaagttacacagcttggtagaaacagaatttaccacagaacttgtgtgttaagccaaataattttctagttccatacaactaaaaattggaaggaaaaagtagagccttatgaatagagtcctgagcaagaaggatgaacaatctgcagatgaagtactctgtaaaggaaagatctgggtttgaattctaaccctgcctccgttcatctgtgtgatcttcgcaaagtctgttaactctttaaactgttggatatttataaaatgggactggtgctatttggcctgatatcttacaggggaagattcagtcaggccaggcgtatgtagggtctctctgacctggaaagccctatataaagacatggtaccattcttagtgttaggactgaaactacatccctagtgtcctgacacctcataccaatacccagaaaccctaggctcttccttcaatcccatactccttcctcagctgccaggacagcttggttaagaaaagccttgttcttggggagtatatccatgaaagtatctctatttcgttgcagtttcacattaagtaaaattagagtgcccttcacgaagaatatataattgaaagccctcccactgactgctggacaaagcacttgtcagtcaacaaaccaggtagattgagtctgccctcagagtttttgtattctgagagtgactagcaactttctctcatcctagagcaacagggctttcagaggacaggttctggggcagcgtgtagccacgatagaattggtttgcttttgtgtccaaagtcatgattatcaggagagctgccatttatcaaccacctctttgatacttggtgtataggacaggcgtgttaactatattatttctaaaccacaagataagtctgtgaagtatttttatccctggtttacaaaggaagaaatgaggctctgcgagacatgccagaaagaacatgctctacacaaccaactggttacaatgtgcggctttgtccagcactacctcttctttcttggcaatcatcagagccactcaaggcttggaggactgtgctggcaaaaaagaaatcttgtattttctaaaactcacacccacactttggaggggacaagattgagatcaaccccatttcctactcttttctttatgacagtttatcagagcattttttccttatattcactcagtcctgagtttctatttagttgtgataatagatacatttttgaatttttaataccttcgggtgcaaatttggaatctatggaggataagggagtaacaaaatgttatggaaattgaaatatataaattattaattttccctctcctctacagatttacaatcactttatttggggatatcaagtaggttatgtggttactgtagtactcatttaataatcagattttatttagagaactataaaaggtacaacttaagggggaaatatattttagatgatgtttttttttcaatttccaatttttgaagaatgacgtgtttttaaaaacttttaaagaatttctcccacatttcactccctttaaggtaaattgatagctgtgaaaatggcaccttggaaacatttctgtcataatcataggagagagtgagaattattaatattctcagccatgtagcatcataaagtagatcacagctgtttctttcagaaaatgtcatttgattttcgatcagatgtatggtccatctcacaatctaaccgcttccacatctggaatatcttaactgaaaatgtccacagcattacacggcctggctcagggggagaaaagaactagggcctgcatcgaattctgtctctcactcagctgatctgcattcctcctatagcatttccttataattaagaagagctcatagatttgggaactgcatgagcctctgtaaccttctggtgagggtgagaagctcagaactgcatttctatgcatttttccctagtctttcctgcttcggaggagaagccctgcaagagcttcctgccaagggaccctgctttctcagcagccggatccggagagccagaaatccatcttcagctcctttgaacttggctgttgttaatcatgctgtggttgtcctttaagagcaaaggcttcacggagagcagatcagctggctgtagggagggtttcagcttctcattgtaggcagatcatctgctaacagcttactgagagaaagttgaggacatgtggctgaaacactgtcagagctgctgtgaacacagtccaagtgagcaattttatgacccaaaccaagcagacactaagtgctttctagtggtggaaaaggagcagagagaaaaagaacaaagaccaagtggtggaaacaaaaaaaatatatatttctttcagcagctaacatatttttctgtttagaagattggtatctcctacttaaccacaaactacaacacataagatcaaataagattaaatgtccggtttgctaaatagcagagcgaagaaactaaggtcaagatttcagactcttacatctgaggaaagagagaggcaaagagaagatactggaaatgccaatatccagtcaatgaaataaacagaggctactgtaggcatccccagaagcttgccttttgtccagtgccatgggaaccacagaaggcactcagctttgcagcttcactcagaattggggcaatgctccacagagtcaagggcatgttattataaagtgctccatttgtttactttggcaagtggaagatgactttgctaagcgatactctgctggggctcagggccagcactgctggagtaggaaaagggagacttcctggggcaaggcttctcaatcttcctgccagcagcattgcagtcggagcggcactgaggtgtcaacaaaaggatgatgaactgtgtcagcagtgttagcaaatggctgaagtagaacggagctgcccaggatgctgccctgtcgctggggaatctgagggaggctgaaagatattgtaaaagagattgaagggctggactggctggaggaatggtgccatcggcatccatgccacaatactccaggactgccctgcctttgtcaggacagccatcagaggcggttttccctctaaccaggatgggcatcactccttgggcttgccagtcttacctctcctcatgcaattgcatgtccaaggcatgccctcaggggatggtgctgatccagggtggcaaacccaagtggggagaaaatgctgaatctcatcctctcagagatctgctgcagtcagcgactatactgaggtgcatgatctgagcagcagtcgctggttggggaggcttctttgtggagtgggtctcagccacagcctgagggtcctctcttggggatgctaccagttaattgggtcatcttcagcctccacccaaacttaggcctgtaggtccatcaattactatatcagcctcaaggactgaacaggtgggaggaaggactagtgtgagtgatggaagcagctgagctgaggagtgctggcacctgtgcaaatccagcaagaatgacatctggctgagcttcagtcattcacctaagcaccaatcgggggtcactcccagatctgagcaatgagggaaacttcccagggggaaccccgcacttgggtagacctgggggagcagccagaaggaaaggggttgaacctgtagttgattaagattcagagaaagaaaaaacaaaaacagaaaacgatcatagtttcagacactcccaatgagcctgtgacctccccaaaatcctatagccaaacacacgggtggatctggcctcactttcccattctcccacttgtgacttttgattccacatcatagctaaggtcctcggcaaattggattaaactttggatttaaaaataaaatagaattaaaataaaataaaaaagttggggacaggagaaagtggtttccaagaacctacacctctctaccctgaaatgactgaatattgtgttcccctcaaaattcatatgttgaaatcctaacccccaatataatggagcctttgggaggcttcatgaatgagattagtgcgcttacaaaagggtcccagagagctctctcacctttttccaccatgtgaggttacaacaggaagtcagcagtgtgcagtccagaaaagagccctaaccagaacctgaccatgctggcaacctgatctcagacttccagcctccagaactgtgagaaattaagttatgtggtttataagccactccgtctaaagcactttattatagcagcctgaactgattaagacactcctgagaacgattccttcggggaaggtcttgattagccttcacctagcccagtttgcaaacacactggagtgtcctgcccatggcaatgttcatgtagcagcctgggagacagaggagggggattcctgcaggagcaatcttcccaaggaggcagttcctactagctaactttcttgtcctgcttgtgctcattgaaggtccaaacctgtcccctgccctatgtttgttttcctcctaatcccctggctgatggagtcaggctttggagaattcctttaagagtcttagttggccttatggatcccaaaacacacccttctctattgatgccagattctgagcaggctgacagtgcatgcatgagaacctttcataaaataggactattttttattccctttgctttttctttgtgttatttcccctcttcactccctgtccttttaccttaccatatacatttgtcacctccttgcctggaaagcctagtgtcacctccctgccttttcacagcctataggattgagtccaaacttgccagcttggcctttcatggagtgcaggtttagtacaggactgctaaacacagtttcagaatgaaccattctcctggcctttatcattgccaatatttctctttattttattttattttattttatttagggagagccgatatttcataagagttgatggactgctttgcctggaaacttgagaattcatatttttattcaaaatcgttttcatttttttgcttagagcctgttaaagactgaggccctctctctgtcccttctactcccagccaaacccaatagacacatgtgagcaagttgtcacctgacccgaagctccagcccctggaaccaactgaaacaaaatgtatccttgcattttccagcaaggaattgccttgcctacaaaaatactctgtactttaatatgcagatcaattattaacagtaggctgtacctttcaccaggttgtaaaaggatgactgcgtagagccacagcattctccttgtcagtgtaggaaatgcagaggaggatgttacctccggcacttgcctctaagacacctaataaagatgaggaaggctccagcctgaagcgtgggtgaggtgtccagctgcccaaaggcgacaggtgagatactcaggtccccttcctctttttgctgtcagttctgattctctcctttcaatctttctcatctgtgattgggaatggcaggggtggggtgtgtttggggcatcagtggtggtaaaaatggtcttatgggcagggccatgttgaataagagatgagcatggagacagcgtattaacttaaaaggccaacaccgaggctcatttgagaccgtaggaattccagggagacagtgttgttcaggcatgggatcgaagatcaggagggcggctcaataacacgctggcccggtcacatgacagaccagtccttggagtgaactgggagacaaggaggctgctttggcatggagctgagaacatctctagatcgcactggaaggcagagagaggccagacagggaactctgaagagctgccacagcctgtgccagggtgacatcagggtgagttgagatgatttttttaacaaacttcattttttgcagcagtcttaggcttacagaaaaattgaacagaaagtacagacagttcccacatacccgttttcccccacagagtttcttctattaataacatcttatgttcgtgtggtatgtttatcatgatgaaccgatgttgatatatcattattaactaacaagtccagagtttacattagggtttactttttgggtcgtatggttctatgagttttaacaaatgtataatgacctgtatctatcattacagtatcatacagaatagtttcacttccctaaaaatcaccctcccttccttcctgcaaatctctgacaactgctgatctttttactgtctctatacttgtgtcttttctgaaatgtcatgtagtcagaatcatgcagaatgtagtcttttctgactgcttctttcacttagcaatatgcttttaagcttcctccatgtttttccagggcttggtagcttctctccgttttagcactgagtgatactccattgtatggatgtactgtagtctgtttatccatttgggcagactttccagcaagatagaaggcagaagcaatggaaagggtggatgaagggaaaactgcaaggaacacaggacaagatagaagcaagagcaggaaggttttggagaagtggaaaaacaagctagagagataggcacagaggcctaacctggggtaaggcagggccttgtaaccaacgctcagtgagagaggcagcccctcactgacctgcaccaggcctttcctgattttatagacagagtgtcatgaggtcatgagggcaggaaccatgtcagcttcatcctgagagcccagcactttgtaggcatctaataaatatttattacaccaatgaaaccttcaaagtctcttctaaaaaagcaagttctcccagacaccagaagacaaatggcctagcagcccctgagccagtcatctcgggcagttgtgagctggttgcttatttgaaccctccatgccacggggcagcatcaagcttgcctgacacacacctcctgagccaggaattcaccactttgccaccatctctgcctggcttgggagatgctccgtggacagaaccagagccgtgctgcagggaagcagaaaaaccaaaggagatgcatgccaatctaacatgccagtttaaaaaaaggcattcttgcctcagagtaagaatccagctctccatgcactcgtctttcaacccaatcacaaggcatcagaattagcccatatgacctctatgggacaagaagagcaagcagggtgatttgggtgctaagaaatagctgtgagaggatgatgcggcagctgtgccctccagatgttcggagagaacatctgtgcaacaatagcagtagctcccatgcactgatgtgagaacccagcctaaggggtacagcaatctgggtggtagggggtagctctcagagggtctgacaattcacctaaagattgcaggaccaataggaacctgccagtcagaatttcctagctcagtggtgccctccaagcaagagagcttatcagccagacctgtgtcttggtgcaacatcactgcttaaaatcaagtcctcccaaggcatggtgtccattttactttctctggatgaaatgaagacagagaatgaacccagtaagatgatagagtgctttgctttggatctgttcatatcttacccgtgtttgtgctcacatgagttacacagtcagtacaagggtagagagctcttgagaatttcttacctaagggaaagaacttgggggctgctttgctcaaaggctatttttcagtgtggggcttatctagagacatatattttgctccttgtccccactgctgttgcataactacgggagttgagggtcactatacacagacacagatggtagagatgggggcagtggttgggcaaggaatagctgccttgccacttcgaagtctcctaaatggcatctctgaagaagaaggatatgtccacagggagaagggccccatggtgactctgttgctcctaatgtgccaggctcagactcttcaaaccacaagaagtggcccagcgagttccatgtaactgcaaatgcaagcaggaaaaaaccacactcagatctcagcacagcatcagtcttggggacagctggcctttcctaatgcagcagcatctggctgcttctgctgtacctggatgtcttcagggcagttcttccacacagaggaccccaaataaaagcagaattcctaccattaagctttccgtatccaaaactttctatgtgaaagatacagcatctgtgtctcacaagaatctgttttcttggggcatctgctatttggcagctaaccaaaacagaattcccatcttattttcttgttcatttgtgctacatggaagggactggtcctgaatattcagggcaacatccagcatttggtagtagtggagagaaagagaagagaaagctctggactgtgttcctctgtctgggaatgtgactctcacacctcccaaatcctcccattcacactttttctccctgactttccagaaccctttttaggcttagctccttttatcttaccctacacgctttctttctacccacactggtgggtacttttcagccatagacattggagcacatttaaatatgctggagtccttagagaattaagaggtgggggagagaggagggcacagagctgaggatggcactagctcattcacaaggagccctgaatttccagggacattaaagaacagatgctcatgacagagcatagagctctgccctaattgtttgtaatgttgaactatgtgtcattcgttcactcatatattctctcaacattggaattgagcaccaattatgtaacagagtaggtcttggcaatacaaagatgaatgaaacataccccttgtccccaagaagtatgtggacacgacaggcacatggaccaatgatggtcatgtcaagcgtgatgaagtccatggtcctgagggacacttggaccacggcctgcatgagagggcctggaacccaactgggcggatctagaaagaattcctctggacttgattcctgaacttgaaggtagagatggaaggagaagagttctgggtagcatgttcctggcagaagaagcccactgcaagagcaaaggcactgaggaagcctggtggtcactggaaaactgggattcaagtagctgaaatcgtaagggtgcagcctagggagaagtgagacccgtggtggggggcagagccaaatctctgtatccaaacctttctatatgaaagatacagtgtctgtgtctcacaagaatctgttttcttcgggtgtctgttatttgagtgctaaccagaacagaatttctaaagatggtctttgaggccaggtaacaaggctgaggctaagaagaactatggaaggtctgttggcaggagagatgtatgattagatctgcattagcagaaggaaagttctggctgaaatctgcagagcagtttggaggggacaagacagatgacatggagaacacttaggacgctgttataataaaataggctagaaatgatgttcctcagaagtccctttctccctgcacacctggccacctcagacttcctgttcaaggggaaggcaggctggggagagaggtttcttgaaaataacacatctgggccgggcgcggtggctcacgcctgtaatcccagcactttgggaggccgaggcgggcggatcacgaggtcaggagatcgagaccatcccggctaaaacggtgaaaccccgtctctactaaaaatacaaaaaattagccgggcgtagtggcgggcgcctgtagtcccagctacttgggaggctgaggcaggagaatggcgtgaacccgggaggcggagcttgcagtgagccgagattgcgccactgcactccagcctgggcgacagagcgagactccgtctcaaaaaaaaaaaaaaaaaaaaaaaaaaaaaaaaaaaaaaagaaaataacacatctgttaattggatcatttctgtgtggtcaatgtctgtaggggctttgttttggtcatcatagtataaaatccccattatgtaatatttcctcctgataaaagctcactgtgtgtctataccctaccagcttccttatagtatttgctcattaccaggttcaaggacctgtctgtgtggctcttccccagagcctctgttggaaagaagatttgtctttggttataagtagatacacagtggtcaagatgctctagcacagtgcagcagaataagatgggctcagtagggaaagatcattcacccctaaagtgtacacttattcttttctgattatgataggattatgttgaaattaaaaattgtttcaacgaaaaagcaactgattgcttaggccaaagcagaactttttttttttttcctgaggcaaagtctcagtctgtcacccatgctggagtgcagtggcacaatctcacaatctcggctcactgcaacctccatctccccagttctagcgattctcctgcctcagacttccgagtagctaggattacaggcacctgccactatgcccagctaatttttgtatttttagtagagacagggttttgccacgttggccaggctggtcttgaactcctgacctcaagcgatccactcgcatcagccttccgaagtgctgggattacaggtgtgagccaccatgcccagccagaattatttttagtactgtagttaagagggcacattctggagcaaactgcctgctaagtgttcgctgtggggcattggggaagaacttaatctctttgtgccttggtttccacatgtaaaatgggataattatattgtccccctgtactggtttgctggggctgccataacaaagtaccacaactgggtggcttaaacaacagaaatgtgttgtctcatagtgctggaagccgactcacctcagaagcatggactcccttacctccaagtccaaggcaatggggctctctccctcttgcctcttgaattcctgcatctcatttcactgggtaaacagggaggctcctgtgctccagcaggaaaaccctggactgggaagcaggatgtctactctgatcctgctgccccaaagctgtgcggctttagacaagtggtttgacctttctgggctcagtttccttgattttcactattatttgaagggcttggggtcatggaaatcatgaactcttcacactgagaggaatcttcataatccattttgtagataacgaacctaaggctgaagaggtcaggggcttgcacccagtcatagagctaaatgaggtgcaaagaacctagaactccggcgtcttgactcccacctgggacacattttatcagtaatagtgaactctcatctgttgatagtgttagaattctcacatttactccccataacaactttctttttttttttttaaacggagtttctctctgtcacccaggctggagtgcagtggcacgatctcagctcactacaacctctgcctcccgggttcaagctattcttcagcctcagcctccctagtagctgggaatacaggcatgcaccatggcgcctggttaatttttgtatttttagtaaggatggggttttgccatgttggccagactggtctcaaactcctgacctcaagtggtccacctgcctcaacctcccaaagtgctgggatcacaggtgtaagccaccatgcctgaccagcacccttctgaagtaggtgctttcagaaatctgaaagcatagtgtcggttagcagggttggatctcttctggtactgtgaggaagaatctgtgccatggctgtctgctagcttctggtggtgtgctggtcatccttagtgttacttggcttgcagaagcaccatcgatctctgctttcatcgtcgtgtggtgctgcccctgcatgcatgtatctgtgtccaaatttcccctttttataagagcaccaatcatattgaaatagggctcaccctcataatctcatctcaactaattatatctgcaataaccctacttccaaaaaacaccacgttctgaggtcctgggtgttgggatttcaacgtatgaatttggggtgggagggcacaattcaacccaaacattacctaataaagttttcaacagtaagtaaatgagttaactcctggaaagcatttaaaacagtgtctgacattcagaaagctctcagtaaacgttacattatgctgggtataaataaaaagctcccaggacagtggacggcattgagattccaccggtttgtattagtgtggcctcgccagtaatttacatcttctatcttttttggttggtcagggcttaagccataccaggtaaatattttgaataatactcctagctaaaaggtgcaaggagtagatactgtgggttctgatttttctttcccgttctccaagctgtgtacacagaaccatgcaagtcgccccaaccagggaaaaacaactgccatttcttttaaaggggaaccaatgaaggtcttgtcctgatgagctcacaaaagcaaacttctccatgtctgtcgctcactcagtgggctgaagcagagccttcacgctaagctttggagacaaagcttcttagagaatgtgcaacgtgggctgatcccaggctgcccaaggagcagctgacgagtgtaaaagtgtttgctcaccgattagaatcagtcctttaaaaaataaataaggtatgttgatcttttatgtgatgattaaacaaatcagatggcccaaaatgaattccaggtaaagaggaataaaatatcagaaggcaagctgctgaaattagcaagagctgaactcgaaaagcccgactttccaggcacggctagtttcttcctagcaagttcctgacggagctgggtggctgccccaggtgactgcagtagcaggagattaaggagacagcacctgcctgacaaaaaaggttgctgacacaataggccaaagttaaattgagctgccaagggaaaatgattggggatatgcagttaacagttgagggagataccagaagaatttgtgtccacagagagattttgatggggctgactttgccgctgaccgactcacctcagaagcatggactcccttacctccaagtccaaggcaatggggctctctccctcttgcctcttgaattcctgcatctcatttcactgggtaaacagggaggctcctgtgctccagcaggaaaaccctggactgggaagcaggatgtctactctgatcctgctgccccaaagctatgcggcttcagacaagtggtttgacctttctgggctcagtttccttgattttcactattatttgaagggcttggggtcatggaaatcatgaactcttcacactgagaggaatcttcataatccattttgtagataaggaacctaaggctgaagaggtcaggggcttgcacccagccatagagctaaatgaggggcaaagaacctagaactctggcgtcttgactcccacctgggacacattttatcagtaatagtgagctctcatctgttgatagtgttagaattctcacatttactccccataacaaccttcttcttcttttttttttttttaaacggagtttctctctgtcacccaggctggagtgcagtggcgtgatctcggctcaccgcaacctctgcctccagggttcaagctattcttcagcctcagcctccctagtagccgggaatacaggcatgcaccatggcgcctggttaatttttgtatttttagtaaagatggggtttcaccatgttggccagactggtctcaaactcctgacctcaagtggtccacgtgcctcaacctcccaaagtgctgggatcacaggtgtaagccaccatgcctgaccagcacccttctgaagtaggcactcttatacccattttactgatcaggagaccggcttgcccaggatcctgcagctactgaatagaggggccagaactttgctggtttggtgcgcttcctggtacacaccagctgcctccaatctccctttgataatcctagccacatgccaccgcgggtgctctagtgtaggctggcaccaaccccacccagcaagagccaggatctgcttcttgagggcaggcaggtttatcacacagcggggtgcagaagagtagtattcatcttcctagtgtaaccacttataactacttttcagtgaatcaaatagatttttaagcaagaacattgtaaaaatctgcttaatcaagggtggagcaaaatgagttagccagggccaccctagctcagatggggtggtagctgcctctgctccacaatgaggtatttacacttgctccccaccctctcctttgccccattatcttttagttaaagggccaggtgcaccagaacacaggtgccttgagtagcaccagcacctctcagggtcatagggaagagctgtttcctctgggtaaactgaggcctcaataaggcataaatgccttctctgggtgaagaagatatgccctctaagatctctccagggtgaatctagaataagttgtagtctagatggcttggcagcactagccagtgtgacagtaagtcttgatgaacatcagtcagcgtcatgctgagggacaacctcgaggagagggaatgtgtacttgttacaacagcacacccaatagaaatagcatgtaagctacaaatgtaactttatattttctagcaaaaaaaaaattttttaaagaaaccagtgcaattcattttaatagatcttatttgtttcaatatatcccaaatattgtcctttcaatgtgtgataatatagttattagtgagatattttccattccctttttcatacaaagtctttgatactcagtgtgtatttcactctgacagtgcacctcaatgtggtgcaataggcgagggtctatgtggtacatcccgtgcccagtgtgcacttaaaggctgtagatccatatatggcgactgtctcctagatagatgagcccagcaaggctcagtgggtgttttgaggtccatggtctctcaggtcccgttccaccccgacattcgacgaatcagagaacactaatatggttgggaacacttttatcttgctccccatagtctgaacagaaagagacgccacagaatacaatcacgactctctccctcctacggactccctccccacaagcaatcaatgggctggtctcagacaaagacacctagtcaaggctggtgaaacctgctctatttcctagtaggcctccacctgtaattctcagcagtttgtgtgtatagatagaattcctgccttctactaatgtgactgttcctgctcagagatctagagttaattattagcaaattcacagtgaaccagagctaggtcttgctgtaaggctcctgtgttttttagaagtacgttgccatggggatttttgtccccactgggttcctcctcaggaccccagacagatagatacacaaaccctgggcccataattttagttagaaaaggcccaagcctagaacctcagggaactcatttggaagctttttttttttaggaaacttacctttcctatttgacatctcaatcaaacaggtgtttggggagaataaaagcatactaccttagaagggactggggtcatctggccagacttgtggaataaagagaatttcattccttgtataaaataactctaaataatggtaagctcttaggagacttgatctactggctacatatacccactatgaaattaacacattctggaatttagatggaagaatatggaaattggtccttctcagtgtatggacgaagcatcagaaatgaagagaagggccaagcctagagagcaaaactaaagactcactggtctgtgggcttcctgcccaaggagagctgaaagctaaaggatgcttcacaatgtcctacaagttgtttttctaaagtccttccagcggttgaaactgtgtttatgcaaaacaaaactttcctttgttgctataatctagaggtggactttggcttaagtcatgccaaaatattatcattctaaaccagtaacacctatatttgttgagcatttactatatgtgtggcactatgctaaacttaactaccccttttcctcatgtgtaacagtcaggtgacttcacagctgccttgtggatacttgtgttatttgaaagattgcataaacacatgtaaaatgcttagaagtctaccacctcatcttacctacagctttggtgagtccctgctttggccaagtagaatcattccctgtgaggaggggaagaggataagaaacaggcagagttgaccttacaggtagacacaacaggcgagggtccatgtggtgcaatggatcccatgcacatgcctgattcagtcattctagttgagtaggattgtctggttggttgttattattttgttttttgtttgtttctttcttttgttttataagatggagtctcactctgtcgcctaggctggagtgcagtggctcaatctcggctcactgctgcaacctcttcctcccgggatcaagcaattctcctgcctcagcctaccgagtagctggggctacaggggcatgccaccacacctggctaatgttttgtattttagtagaaatggggtttcaccgtgttgcccaggctggtctcaaactcctgagctcaggcaatcctcccacctcagcctcccagagtgctaggattacagacgtgagccaccgtgcctggccagtttttatcttgaaagcttaagggtctcccacttaaattcaaatactcttctgaggataaccttttaatcagccaactatcatgaatctcaattatcaggaattccagttattccaattatcaggaattctttatatcatcccaggaatctaaaagagcaaggtcttataggtaagggcaaactttctgatgccttggaattcagaccctaagtagagatggtcatttgacatctagtctgatcgactgtagagttacttctatacaaataaattcaagttatcacagggtttctttcagttggggacaatactttgaaaacttttaggctctgaatgaataacttggcaaaagaaaatgttagggtccttcaaataccatacttgttgtggttttctcacagatacaccagtctataaccctgaggtttcaacactccactcagttgtgggctttttatctaaatcaaaactatcacatgcccacatgtgcatctgcagccaaccacaaatgatctaacaggaccagatttcactggagctctgtgacccttctcccagtgtgaactgaagggaaaaaaacctggagcctaagggactcccttttccgtgtcctgaagaccactggctttggttaagccaatatgatgggctcattgagagagagactcaggacctcggatcatgccacactctctggccccagaaggcataccacaggctgccagctttgttggagaacctgagacttaaggccaggatatatcaagagccctgtacccagttctgtgatgtcttaatacctttgacaagagacattggcaactcactgggtgtccattggggggcgacaaggaaacagactgatgaaaccagagaatgtgacaactaattacatgttgtttcctgtagaagagaaattctcagaggaacgtggtgactgtctgttctttaatggactgtcatatgaaagcaggagaaggagattcttccttactccaaatgacaaaactaggagcagtgaaatgagcttataaggtggccgggtttttctagcaattggagctctctgcagtgagtggacacttggcagggtagtgcctactccgcatttgatgtgttcacaccacggctagaagtaggtgtcgcaacttccagttgaagagggaattcttttccttgggtgggagaggggctagagaacgtctcaggttgttgctaactatgagcatggttttataattgtttaaaagtgggtaaacaagaagagtgtgtttatggtgtctgtattccacaaactattatttcccacattaactgtttcatatatggaaaatctgagaaacaggaatgctaacaaggttgcagtataatttaaaaatacttctgagagatcattgtatcccaaaggcagtgcccagtgaggttaagagcgtggtttgtggaatctgagcccacaggggtttaaatcctgcctctgcccttcttagattctgtgaacttggacagattccctcacttatttaagacttcacttttcagcccttgagatcccacctgctcaattatctaaatgaaatctatcactgtggaaagagcaaaggcctcctgctgttgagcaaaatgttttccagtcctttgtttctgtgtgaaataaagcagctccatcccagtgctaaatgatcaactgcatatgacagaatgagcttatttcatgctcccagtaaatacaagaccatagactactctggatggtagtttaagtttaagatgaaattgcttcttctgattgccttcttctttattgcttctttctctgttgttccttccttctcttgtttataacactaacagtcaaatctatctgtgtggaaatctatctactatatagaacgctacatcacaatttacagaggggaaaatatttttgtcggcagtaacatttcactggaagaggcactatttggccacctaactctgggatttaggctcaggtagaatcagtgcctcagtttctttaggtcagccattatgagttgttccttatttgacctagcacatatatagatggtggttaaatttagcaaaattctcttcacaaaggtttcatttgtctggaagactctaagtactgatctggtcagagtaccatcaaagccccttgtttgtcatgagaccgtggaccaacatgttagtctttctcatgtaaaaaaaaaaatcatcaacaaatgcagtgggagttggtagtcatgagtttgaggtagtacaatatccttaaagtacacactcaatcatgtgtgataattggccaactctacctaacaacagttgaagacctccaaacagctatcaggactactggaatcatgtctccagaagaacctggagaaacattcacatttgtgtggaccaaggaggaaagcaacccagacgacttctacttagaagcacaggcacatagagcctgtgttattggcacaggtatttctctcctaagagccttttctgcttaagaaggcttgaggatctattcccattaatcataaaaaagggatttgctgggctaaattattttagcctcctctttatgccttacttcacaaagaattgcagttaatctgtaaatgagttctgatgttatgaaaattggatatggcaaattgtgttattaagtctattaagggatgaagaaggactcttctaaaagaataacgtagtctgagtggcagctctcacttaatagacatctacctagaaatgtttctgaacttaatggacacatgatataattcaaaattaatataagcacacagcacctctccccataaccttattgaaattaagggttccaaatcattcttctctcccttttacttcacctgcaacatgtggctcacccttctttagactaagagctaaactctaatgcctagttaatgtaaaacaatgccaggattattaagcatgattctgataagttttaacccctaatgagattatccttggttaaataaattgaatggctagtggaattccaatgtaaagtcagcagaggttagctggttgctagatatttaactatacataccaggaagctatgaggacaaatttccatttgcacagagccttgagaattggccattttaggactaaatgtgctgctcattacttttactcaaggacatactaatgaccaatatatgtttaaatacctactatgtacaactgctttcaaaaacactttcaatcttgaattgagaaggtaggagatccatacctgtattaggccatcctcacagtgctataaagaaatatctgagactgggtaatttattaaaaaaagaggtggatgaagctggaaaccatcattctgagcaaactatcacaaggacagaacaccgcatgttctcactcataggtgcgaattgaacaatgagaacacttggacacagggtggggaacctcacacaccagggcctgtcatggggtggggagagtggggagggatagcattaggagatatacctaatgtaaatgacaagttaatgggtgcagcacaccaacatggcacatgtatacacgtgtaacaaacctgcacgttgtgcagatgtaccctagaatttaaagtataataaaaaaaaaagtggggaaaagaaaagaaaagaggtttaattggctcacggttctgcaggctatacaggaagcatgatactggcatctgttcagcttctgtggaggcctcgggaaacttacaatcatggcagaaggcaaaggggcaacaggtatgtcacatggccaaagcaggagtgagagagagaacaaggtgccacacacttttaaacaactacatctcatgagaagtcactcactatcacgaagagagcaccaagggaatggtgctaaaccaaggtccccaacccccaggccacggatcagtattggtccatggcctgttagaaaccaggccacacagcaggaggtgagtggcgggcaagcaagcaaagtttcatttgtatttacagctgctccccatcgctcattactgcctgagctcagcctcctgtcagatcagcagcagcattagattctcataggagtgcaaacgctattgtgaactgcacatgtgagggatctaggttgcacactccttatgagactataatgcgtggtgatcggtcattgtctcccgtcactcccaaatgggaccgcctagttgcaggaaagcaagctcaggactcccactgattttacattatggtgagttgtataattatttcattaaatattacaaggtaataataatagaaataaagtgcacaataaatgtaatgtgcttgaatcatcccaaaaccaccccctctctgccccgtcccagtccatggaaaaattgtcttccacaaaaccaatccctggtgccaaaaactttgggaactgttgtgctaaaccactcataagaaatccaaacccatgatccagtcacctcccaccaggccccacctccaacactggggattataatccaacatgaaatttgggtggggacacacatccaaactatatcaataccttcataaaagcaattaaataactgtacagtgtgataggcaataaatgtcaaatgtcatatgtatgaggaacatagagaggtgctgttatcaagtcactgtgtgacccactgagcactcgcaatgaggcacaggtagtaatgtacctgctcacttgcttattgttgtcccaccacgctgaattgggagcttcatgagagcagggcccatgtcgcatctattaccacaactgccttattcgcgtggcctgtagctagcaatcagtaaaaaattacagcatggatgaagctacagaaagaaagtaaatactgacaggtgggcaaaatttttagatatggatatttaatgatgggatgaacagatgaatcaagacaggaaacaaggcttcgcgtggcaaatatatcctttcatttgcccagcaaacatttgcagatccctcactatgtgctagacactgtgggcacatttctgtgtggattggtgtttttctctctcaaaactggagagattttgagatcagcctgtatgtagtgagatgaagaggtatgtggttgagatcaggagtagttgggattctgtgagggatagggctccttaggtgtagagagccttgagacctttgttgtgaggatagtgaaaatcaacaaaagaatttatgttaaggaaggttaaaaagtcactctaaaggtctcagaagtgcctatgacatcatgaggagatgtccattcctgaaaactttagccaggttacaaacactttaagaaatcctatctcaaaacttcaagaaaagtgagatctgtatttacacagatagaatttccaggactggattatatttgcacttttttgttaaatttttacttaactagtatattaatattgatagtactttgtgacttttttcataaatataacttttaaaaaatatggtatttctaaaaaggtttggtgcattgttaaaatgtggttttgatttattcacagacagaaatcttctctaacagactatacttccatttcataattcagtgaggtaatgggactcagttatactaaatttatcatagagcaaactttgctagttttcatctgttcattacattttatgtaatggcagacagtgtaataactaataccgttaacccaaccatctcttccctataatgtttctataggaacatacagtgtacattttgcagttctctacacgcagacaaattctaccagtgtgtattctgattacaagctagttgcttcataggccatatgtctatcttcagtccctatgaatcatgtaaattacagagcaaactgccgatactcagtatatgtatatgacacataagagtcaagtatactcagctcctaagagcaagtgagaagacaaagaagatctactgtgtgtagaaatacttcttaaatcatctttcctgaaggcctagtttgcaactgagtcgcaaaaatttggtttcaaaaagttaagcttgcaataataaaaagataacccagtttaacaatgggcaaagtgatctgaacagacatttctcaaaaaatgatatagaaatggccagtaagcacaagaaaagatactcatcatcattactaattagggaaatgcaaatcagaacgacaatgagtcacctcttcacagtcactaggatggctatgattaaaaaaaaaaaagacaggcaataaccagtgttggcaaggatgtggacaatttagaaccctcatacactattggtagacatgcgaaatgaaatagtcatttcagaaaacattctggcagttcctcaaaaggttgaacataaagttactaggtgaaccaacaattccactactagctatatatccgccaaactgaaaacagatactcaagcaaatacttgtacatgaatgtttatagcagccctattcacactgtccacatacttgaaaacaattcaaatatccatcaatggataaatagataaacaaaacgtggtaatttgtacaatcgaggattcagccatagaaaagagtgaagtactgatacatactagaacatagatgaacctcaaaaatgttatggtaagtaaaggaaaccagtcaaaaaagaccacatactttatgattccatgtgtatgatatgtccagaatagggaattccatacagacaaaaagtagatgagtgtttgccaggggctggggagaggtggggatggggaatgactggctgatggttagtttccttaggtggtgaaaaaaatgttttaaaattgattgtagtaatggatccacagccttgtgaatataccaaaaaccactgaactgtgtaggggtgggttgcccctccacacctgtgggtgtttctcgtaaggtggaacgagagacttaggaaagaaaaagacacagagacaaagtatagagaaagaaataaggggacccggggaaccagcgttcagcatatggaggatcccgccagcctctgagttcccttagtatttattgatcattcgtgggtgtttctcgaagagggggaggtgtcagggtcacaagacaattgtggggagagggtcagcagacaaacacgtgaacaaaggtctttgcatcatagacactgtaaaggattaagtgctgtgcttttagatatgcatacacataaacatctcaatgctttacaaagcagtattgctgcccgcaggtcccacctccagccctaaggcagtttttccctatctcagtagatggagcatacaatcgggttttataccaagacattccattgcccagggacaggcaggagacagatgccttcctcttgtctcaactgcaagaggcatgccttcctcttatactaatcctcctcagcacagaccctttacgggtgtcgggctgggggacggtcaggtctttcccttcccacgaggccgtatttcagactatcacatggggagaaaccttggacaatacctggctttcctaggcagaggtccctgcggccttccgcagtttttgtgtccctgggtacttgagattagggagtggtgatgactcttaaggagcgtgctgccttcaagcatctgtttaacaaagcacatcttgcaccgcccttaatccatttaactctgagtttgacacagcacatgtttcagagagcacggggttgggggtaaggttatagattaacagaatctcaaggcagaagaatttttcttagtacagaacaaaatggagtctcctatgtctacttctttctacacagacacagtaacaatctgatctctcttgcttttccccacagaactgtacactgtaaaagggtgagtttgtggtatgtaaatttatctgaatttttaaaataaaaaagaaagttaaaaaatgttaaacttggaattaatgatggtttttttgaagcagattagtaactactgaaattagtccttgatttttggaaaagcctttaaaaaatggtaagtgggagaagttataaacaaagagatgaatgagtcacagaaaattgggagacaaatagatgataacaagggacagtacagaaagactcaactgagttttatcaaatcactcaggcagataaacatgggggctgcatgtgcatccgtatgtgtgtatatgtttatttacatctaatatacacacatgatattacatgaaatattataacatataataaatatatattcatactggaaaaattctcaaagaatataccaccaaatgttaacaatagctgtccctgtttagtgggatttcaggtgacttagatcctttccccctttggcctctcagtatcttataactttgtgtgctaagatcattgatagttgaacaataagaagaagaaagtgagtgtggaaggatgttgctagagaaagtgtattcttgattatatggaggaagtgggggcagtttgtgaagtcttccttacgaatagcatcctatttgagaagaccagtcttcacactggaaaaaatgcatagagcaaggtgggcatcacttgcagaacagtttggcacaggactacctctgaaatattaaggcttaggagacttgttcttagaaactcttcaggcaaagtttacaaaaggccttttcctccttgcttagcagattctcccaaggcatccacatctacactctccgtaagtcactatatactggacctagcacacatctgtctacccatcattgtattagtctgtcctcacgctgcttataaagacatacctgagactgggcaatttacaaaagaaacaggtgtaatggacttacagttccatatggctggggaagcctcacaatcgtggtggaagacaaggaggagcaagttgtgtcttacatgaatggcagcaggcaaagagagagagcttgtgcagggaaactcctgctttcaaaactatcagatcttgtgagaattattcactattatgagaacagcatgggaaatacccgcccccattatttaattatttcccaccaggtccctcccacaacacgtgcgcattatgggggctacaagatgagatttgggtggggacacagagccaaaccatatcaactatctatctatctatccatccatctgtccatccatttatctttaattgggatacgtctacaagacaactgatacctaaaagtatgggaatttcatttgctaagtcacaaaataacttttaaaccatccttatattatacctaacatgatctgagcacataatattgtctaagtcagacccattcttgcctctctgagcttacactcttgtcaagtgtgagccagaaggagttggtccaagtagagcaagtctcacaggctttgtggtactcagggtgggggtcttacccaacatttcctcccagaagctgaaaggcagagacaagaaattcatcctgaaagagttcacaagggtaaagtcaaggtggctggtccccagacaggtcataggaataaggttctggtcatacaacaggaggcaaggagcccaagtagagggacttgggtgtggggcaagtgggagggtttcattgaaaaactaggtagaagacagggagtaatggtggataaggcaaaggacagcatctaattcaggcctgtcatcaagctagagaatgttcacagcagtgttgtttgaaagagaaaggcatggaaaacactttgttgtctatcagcaggtgtgaataatttaattgtggtgttttcaaatagtgagatttccagcagaggaaattaataaaccagagctgcatgtgtcgatgtagaaaaaaacccaaagtgtccagacatggtggctcacgcctgtaatcctagcactttgggaggccgaggcgggtggattgcctgagctcaggagttcgagaccagcctgggcaacatggtgaaactccgtctccactaaaatacaaaaaattagccgggcgtggcggcctacgcctgtagtcccagctacttgggaggctgaggcaggagaattgctagaacctgggaggcagaggttgcagtgagccgagatcgcgccactgcattctagcttgggtgacagagtgagactccgtctcttagcaaaaaaaaaaaaaaaccgaacacccagtgttctcactcataggtgggaattgaacaatgagaacacttggacacaggaaggggaacatcacacaccggggcctgttgtggggtggggggaaggaggagggatagcattaggagatatacctaatgtaaatgatgagttaatggatgcagcacaccaacatggcacattcatacatatgtaataaacatgcacgttgtgcacacgtaccctagaacttaaagtataataaaaaaagtaaaaagaaaagaaaagaaacaacaacaaaaaaaaactaccctttaaaggaatgcatataaacaataatttatttctttcacattcatttcacagtttgcttactgaagcatcagtgtgtctttcaattggatgtgatgtgttttgaagacataagaggcaggaaagttttggttgccaaaaataaagagaaacagggaagaatttagcttctgaactggatggtcactcttgccagaggccttggaggagggcaaggttttgcattttgtttgccaattttttccttaaataaagtgccctggacttcaggtcagtcttgccccttgagctgctaaatgattctgccagattctttcagctgagctgtgcggggtcctgaagacctgctttgacttcctctgcaccaaactgactcactccccagggaacaagatcaaggctgaggaagagaaaaagcagggcatgaatggaccctatacccaaaatagtaattccattttctccacctgccattctaccatcacagtgaagcttttctaaattgtaagaggctcttgtaaaaatgaagccactcctgggagatgttgaattttatcagccaacatgtatgtgggtgtccatggaaaacaagaccttggcaaattataccacaaatgggctggggcaagtgggaggagagtgataggagaacgtttgaatcaggacaaaacgagtgaacaatgtggaggcaaagggtgggaacaagatgtgctttgccaaccagacaagtttttcaaggctaatttttctagagaccatcttaagaacaattgcaacactagacaaaaagcacacaaaccaaaaaaagaaaaaaatctaaacccaacagcctaagtatcagaaaccatcttcttatccatatggttaaaaagtcaaaatgaatttattacattttcacagaaccatttcctgggccggaactcatttctccttaaataaatactataaaattttcctcagaacaaatcaagtcccctctataaccccagaagacaaagtacatcggcagtaaaaacagacacaaagtctccactgttgtcagaggtagcatggcctggtgggaggacagggagctcatgctgccgcatcagtcgggaggagggatttgtcttctccacagggcaggatccctacaggaaacaggacaaactgagaagggcttgacaatggaactctttacaaaggtgtcagcagagtattcaaaaccacaggagaattgagtgtcagggctagcaactgtacggttccagagccaacccatgtcggaagggtcagagggtgggacagtcaccacaaccccagaagggagagttctgtagaaagggccatctggagggaagcagtgaccttcagtcagcccaaggtgacagccaggcagcaaggagatgagtaccctcagcctcactccttcccttcctccaacctcctaccaagcctccctgtgggtcaagctcatcctgggagtcagaaggcaagagagcccctagatgcagtccacatagttcagagcaggttgcaggtcaggaagggtgaagacaggagaggcaaagggaagacattgggcaggtcttccagctcacggccctgtcatgcctgcagtcactgtagtacagactgaatgttcactgtgtcctgctttcagcatttaagatgcctctgagataaagagcctgccttgagtctcacgggacatgctcacattttctgaaaccatgtagcttgcactgttaacctcttcctcggtttagaggttttaggggctcgtttcacaaagctgccccagcccctcatgttaaacaacctgagggctgtgactgggcaaaaaataaataaatacatttgcattcaacattgacaaaatacacacttaagtgagacttttttgcatcacaaaaaaataagtttttacttttttcaaaaagtaaaggttctttaaaagatatcatctagagtagaattaagggctattattagaaaatcacagtggtccctaggcaagacattttgagggatgaacttaagcaggccccagactcacgtcttccatgtcctacaacccaggcataccccatcatcccataccttcaatttatccaaatacttcctgtttcagttggcaaattccactgccccaagcttccaaatgtcttccactgctggcttagccttcttcctaaatcccctccccatagtgtcctggaccccattaaaatgccagcaatgaaagcatctcctttcccctgtctagcacagccaggtacatctgttctgagtggtcagtgcccaaaacagcccagttgctaaacagtttgaccatcacctatgctcacacaggagttactgagatgatggtcctcaactgcaaataaaaaaacacaggccactctgtaggagccattagctcacaacttgctgggcaggctcaagttttaggactcagcatgctgaataacacctctatccaatggtaaatttctctggaaatgaatccaaaaacctctcagatgacagatcctgggactttcaagttgttacatagcagcaagggttgctgtcatgatttgtttactctttgattccctgctgtggctcatttgagatcttggagtgtttgctgcagtaattatggcaggatttttccagagtggttttagcatcagtgaaagaattagtgttcattactccttaattctatcactcaacaaattataggggtaaaattagatcctattaaaaaaaaaaaaaaacagggaaaaacagcaaacagaaacaagccggaaaagaggaaactaaattcaccctctaatactgataagcaattcttccctaccactaaattttaaaccttcatcagagacagtactttgtccgtttgttcaatactttattcttagtgcctattacagtgcctggtacatagttggccctcaatatatgtttatttaatgaactgattaaataaactagactcaggctctgacccttgtgctaaatctgtgctcacaatagatgttttagggcatattaaattttgaagtcagttcatctctatggaatttataggcaaaggggctttctttttttagaggtaggttcttgttctgtcacccagactagagtgcattttgcattttgagtgcagtggtgtctgccagtcagactagagtgcagtggtgtgatcatagctgactgcagcctcaaacttctcggctcaaacaatcctcccacctcagcttcctcactagcagactacaggcacatgccattgcacctggctaattttttaattttatttttttatttttgtagagacagaggtttgccacattgcccaggctggtctaaaactcctgggctcaagctatcctcctgcctttatttctattttgaagcaaacaaaatgatgcaaatgaataaagagtcctaggaagaagtgtcctctgctcttgactgtccactaactccagacttcatagtggccccctttgcttaaggcatatgataaacttctaatgatgcttgaattatatttccaccagcaggatcagttattttcctcagactcaaattttgcaatcaaaatgcacagtgtacacacggctgcttatattgcagcacatagcatctattttaccatttcaatttgtgtgatttcttacatgatggattgtgggatgacaataatgtgttctcagtgaagcctcttgactaaaccaaaatttgcatttttataaacctccatgaaacagctttacttagtaagattctataatgctatactaaagaaaattacgtggtagcttctaaaagaaatactccctccatcacagagaccgagcctcatatgaaaacagtaagcagcacacaggaaactcatgctgtagatgaatttggagagccacctcaggttatttgcattatagaatgctaaacgcagactatgcaagaaaccagccacctagagagatctatatagaagtagagaaacttccataccaccagcaattttggctttccaataaatattgagtgatgtccaaaagtcgtataattcaaaaagtctagggtaaggaacaagataaaagctaacccttgtgggtgttggtaaatcaataattaattggagatcttccatgatatttcctcataagaatcattgctaaaattgttgtaatgactacacagactcccaagattgcaatagtcaaacaacacaaactgttgaagtcatgaagggatatgcaacatggctccttggttaaccttttggtagggatccagtttccaccatcatgaagtcctgttttcaatattaatttacatcattagaatgcctgctgttccatcagcattttcttgagatttcctgggccattctcagaaaccagagttagaatgcagaaattaatcatatttcattttgacctaactattatacccagatatttataagcctgaagtatatttttgccttactgataaaccaataagaaagaacttgaatatctcataaaataaggtctttccgcaagccacacatatctagatatggataatagagctaaataatcaggtgtcgagtccaatacactgtcaatctatgtttgacaagcatccagttccttgccttgagtcattcagttcttcgttgttcttgctggaatgaaagcctatacaaaacctagcattaatgaagttaatatgaaactaattagctgcaatgctactgcgggaaaacggccaatcatcatttaatgaatgattctcagttaagcacttcagaaaagtatttcctctgccccataatcacccagcttcatgaagatcctgctttccaggtttgaggtgtgggatccagattcacttataacctaatcaggaaatgaacaggatgatcttgtactgaagtcctatattagtaatatatcaaatgaataaagaaaaatgtaaataaagttagaacttgtagtatcgttttatcaactcgcagtatgtgaaatccatgatgtacctgcaccataaataaaacaagatcttcaaacttcccagggctatttaattcttccatgatttttgttcacaaagaacaatcattgctcagcctattcattgctccttttggaatgaaatacttttattactattcacttcaaaatatttttaaatttctgttgtgattgctccttagacccacgggtttattaaaagtatattgcttatttttaaatatttagggatattttagttacttgtctgatattgattcctaattcagtttctctgtggtcagaatgcatgttctgtatgacttcaaccctttgaaatttgctgaaacaatgttatgattcaggatatggccttggtgaatattccatgagtacttaaaaggaacatacattctacagttgttggctgtagtgttttattatataaacgtcaattaagtcatttcttaatcatgttgagaaatcatctatgcccttactaattttttattttcatgtttaatcagatatgagaatggtgcgttaacatcttctatgattgtgtatttgtctatttctgcttttagtcttggaagtttttgctttgtatattttgggtctatgtaattagatgaatgtagatctttattttcctgatgaattgacccttttatcattatgacatgtcactttttatatttaatagtatttcttgcattaagttttaatttatctgatattatgtataactctaccaactttcttcagattagtgttatgatggtctttttttcccatatctttattttcaaccttcttggtccttattagagtatttaatccatttacatttagtgtaattactggattatttgaatttaaacctaccatcttagtatttctttttctgttgtctcacctattctttgtttctattttaatccctgcttgcctttataaaaattttaaacaatgacaatttttaaaatattttcatttatcttctttgttaccttattaattaggcctctgttgtaattcacctagtgctaacccagggattatagcatccatctttcactcattacagtctacttaagttaacttagtcctttagttagcatcatttctgtcttccatactactgtatgcgttttaattctacatatattattaaaattataagacatttttattgttgttttaaatagtcagtttaaaaaatgtaccctatatttactgttttcaatgaactttcttttttcccacattacatacttccatgaacacctccttttggcctatagaactcctattaatatttcttttagttcagagctgctggtatgtattttctcagttttagtctgggctcactttctgtgattctctcatccctggattattgactttcaaaactcagtcatattggcagcccctagcccagtgacactgtctcaaatcccagaacaatttatttaatgccacatctattcttgctccaaaaattggcaaatgcctcaagaagaaatgaagagaagccagtatgagactcgcctcaatctacttcccttttctgtgggatcttggatccctctcattgaccaatatctttaaagagttagatgatagatagatagatagatagatagatagatagatagatagatagatgatagacaaacagattgatgttatttttagcagcagcattagtgtgaataagctactccattttagctagaggtagaagtaatttcttcttagagaaaaagtttgtatagaattgaatttaccatcatagccattcttgaatgtcaggccaattgaactcctaagactctagcatatacaaaaaacagaaaccactatttcttatcatatgtttaagggtgtgtatttggaaccaatttagccacaaacttccagatgatgctgacataccaataattactattaaaaagcaatataatacacagggaaagcaaatatagtcaattgatatatgagctgttgctcttattgcaaggattgtaagagttctgcagtgtggccattatatgtgtgcctcacaacttgtattcattgtaagcttcctttgagaatttttatctaagaataagtctaccctcattttttgtggagtatcagagcttcttctcctatttgtcttcaagattgaaaggagaatattgaatgctgattctctgaacatctgcaataatgtattccaagatattggcaaaatcagtccaaaggctcaaccatcccagctaattaaattacctggttaactctgtggactaccaaatctaaatggatgtaagagaggaagaaatttgaaaaaaataaagattacacagttgaaaaaacaagatattctccagttatgaattcttttccccaagagtgtcttttgtgtacattgttattacaaaatccagttgtcacattaaacaagccatgctatccaaagcagagttgattgtggctggaaatttattccaatattgaaaagatgtgaaagggctataacacgtatcagacaatctagaattgaccactaggggacatgaccatgaagccttagacaataattcatatttagtttgaagtactattctgaggcaaaacaaacaaaaaagaatgattatggaggactcaatcttaaagtgtctccaagcatgtcttgttctgtctcaaaccttggcctcaacaatcaaagctctgtatcattatttgcaacacatgaatgctaaatggtatcatttctgactatggacctatgtgtagttaagttgtgtgtaggaatatgaggatagaaactattactatcaaccaaatggtaatattggacatgtttcaaagattgtctgaaagagcttgtccatggagactaacccttaacaagtcccaggtttctcctctcctagaatgtgaattccacgttcaccagcagaattcagttctgctgaaatagtcatggaacagtattgttttaatttctcaaacttttcaaccatatgtttataaaggtttataagacaaataagactatccctggcatataattctttcagtaaatacttcacatattcttccataagaattagcctcttctgtaaactctggagctaccccaaggtaagatcgtactactgtaaataagcccgaatcactagattccaaaggccaatggttacccaggcattatttgtttatgacctaagaaaataagtccatagaaataaattggcttgaacagaaccatcaaaaacccctttcaatagacatctcaaatgaaataggtggttctacttcctgagaacacctaaagaacctttgtgtaaaagaagaaatcattatttccattcagtagcaatttttgaatggtgtaacttgctatctccttgcctattggtacaatgcagagaaactgttcaaaggtgagccattcggtaaagaacgatagagttaatcagagagtctctgttatgcagctacatggaatgcaggtgttcattgctggtgtttttacccgctttgagttcttgtttgtttttgttcctatagtaggatgctgcactgatttgggcagggcaaagtggtggttgatggaagagcagaacacctgggaaagtcatccagagtaatttttgatcccaagaaaagatcagcagaattctccttgagtctctaagtcttcacattgtagaactgcttaggtaaaaactaattcaggaaatgtgcagttataaaactttaataagtcacccattaactgacattttaaatgtaaatgtactaaggggactctttatttccctctcattcgtaagtggaccatcctcaacacagagacccaaaccagaaacttaggaatcatctttgattactctctttcaatcttatcaaatcttattagcaaatcttatccctgaaatctttgtccctgaaatatatctcaagtcttacctgtcctcaccagttccaccgctaccatcctaatcctggcatcaactctgaactggactgagtcctccagcagcctggttccactgcttctattttttttccattgtctctctccatttcattgtacacacagttgccaaaataatattttaaaatctgtatcactaatttaaacgcttgtggcttttcagtgtacttagaagaaaatccacacttgtagaccctgatgcattcagcccctacctgcctccccagtcttataccagactccatttctcatatattgcagccatgcttgccttttcaacatctcaagcaatcgaagtgctttctcgatttgagactttttgtgcttgctattttcattgcccggaatgccttttctgagaatctcaagcagttgactcctctgcattttttatgtataagctttacatggttcatattcagagatcccttccctgagcacccttagtaaactgttcttggctttgttgggtattattggaacttaccactgcctataattattatgtttgtcatcaggtttacttgtttcttgcctgtgtcctccactagattgtaagccccagatatcagctaattggttgtataagtttccattctttatatagtctttgaatagtaatcatgtacttagtaaagccactaaggcaagtggccaaggagacgtggacagttatttatatctaatccaatctgaagaattattccaagcaaaaatgacgtgactgacggcttaaaatagctaaaaacttatttagttctatctcaaacctcagcttcaataagcaggctttcagccacatgttttcagtatatgaattgccagagcttcctaccaactagtcatatagtgtgtctaccttaacctggtacctttacttgggttgcatttcatcagcagccaagtccatctatttgtcacagtgtctctagtacactgcttctacatagtcagcaatcagtgaatacttgatgcctgcatgcatgaataaatgaacttctcaggaatgctagggccagagaaagttgatgtttaaaaagttagaaaatgtaggcacttgagaaggattaagaaattaacataagccttctttgaatttatcattgaaatctattattcaatttacatgtacaatttcagcaatacatatacttcctttagtcaaatacatctccctgtagcacttaccatgtctctgaccctttgccttgcaaattccactctgataataccagcagtgaatagaaatttaaaaagccactgtcctcactccttccactcatgttctaatgtaagcctttcttttatgcagcctgaatgcacaattcacttgtcattatctcgcatcctagctgctcctcatgaaatggcattcctctggatttgctgagtcctaatgttcaggcaaagtaaatcccacatcattctggcaggctttcaggaagacttagggactcgttgtctgctagtgcaaataacagcaaagtgtggtaggacttcctccttagttcagcgaagagccaggtccttgtcgcacggccatgaaaaattaggctcacagacgatttcgagggggagaaaaatgaaatttattgggcaaaaatggggaaattagaaacaggggccctctccaaagccagagtccctgctagagtacttcccacctcacaggttgaatcccaggtgccacccaggaagaggaggggccagactcctcccctctgccagcagagcaaacttctgtggctccaccccagtgtgtattcctcccagtgcgcaagtcggttggagttttctgggaaccgccttcccacctggctgtctcaaaaggactcccagttgcagaggtatgtgtgattcaacaagatccactggcagaaaatagaggcaaattaactcaaggagtccattggaatatatcaacgtactccccttccactcacaaggcaatgatttctaaaacagtgaatcattttacttacaaggggtcacaatggagacaggatagaggaaactgcccgggagacacagggacgaggcatgtggagaggtagaccttggatccagttctgcagccagtgagctgctcactcagacctgttgctcccctccagagcctccctttcttcatctggggtatgaaacaactggaccagcttatctctgagatcccgctcagctctgaccctcctgttggagaaggcttgcattctgagactgcagtcccaagtagcaatctcttcggagggcatgtatgtgattacgtacttagtgtgctcacatagtttcataagaatccggtaaaattcattcttatgctacttttgtattcccacttattttgaatggaaaatccttgtacatatttcctcaaattatggataaaaagtatacaaaatacaccctagaggccaagaagctccttttggtagaaagaatgttgagccctatgaatttgagctactcaaactttgtggtttgttttgggagccaatcttgaatataaaatattttttgatccagcagaaaggtgaaatcacattgaagtttacaaaatagtaatgctaagatagatagattttcttgtgtgccacacttatgttgtaaccagaacttaattcaccataatcattgacaagtcttttgttactggaaaggataagggttggcaggtcttgtgacaaatgttagaatttaatgcccaggatttttcttgatgcacaggactcattggaaaagcggcagctatttattgtgactatgaatcacgtccacagatgaatatgattaagtgctaaatccatagcagctcaagttttttaaagccttggaaaattggctttaaaaaatatcacctgacaaacctcaagctttttctgtctcacaagacttttggaaaagaactaggatcgacagtgttttaaggctcacaaggaaaagaatctaacacttgtaaaattatcttctgtgcaagttttattttccaacgtgaatctgggctgccaagcatactggctctagccagatcttcattagccgatccaaaaagacagtcggggcatttatccagataatgcaagccaacactaccctctgagaaaacaaaaagtaacttgcctgatgaagcaaggaacctcaccgattattccagattaatgcatctccttttactggcaccatgatcagatattttcaagacaaagtacttggcaagttggaatccagctgggtcctttgatttttgaattcactttgcttctgtgattatggccacagttttgaaaataaagtcatgtggatagagttgtgatttttagggatcaggatgcctcataaaacaacaatgctgtattcttttgtagaacaagatcctgcctaggcctctttcctagtattaatctttggtcatgatgaatgtgctcccaaccatccaacctatccctttgcaaccaggcttttgtgagatcaaataatttttagagttgaaatgaagttattaccagctctaaaataaggtactacaggagggaagtaaggaccgacaagagttaaatcactttctagggttgcgcaggtaactgggaatgaagccaggatgacaactctacttgctctttcattgtatcttatgcttctctgatgtcttccaagggatagcaatataatcaatagtcttgaaagaaagatctttgtagagaaagggtcagcagattatgtttgtaattgactagatagaagtagttttgcttttgcaggttaaatggcctctataaaatgtaattacccaatgggttcttcctgcccactacacaaagaccacagctctgcagtaaagagtttaactgacacaaggccggccacgccatgtgagagacagagttattactcaagtcagtcttatcgaaggcttgtgggctagtggtttttcaaagacagtttaggggaagaggtgggggtggctaggaaatgggtgctttccactgattggttgaagcggagaagaaatcgtaaggggtcaaagctgtcctcttgagctgattcacttataggtggggccctaagggtgatttggcaggtccgggtgaagccatctggtacaagtggagccaaccatgtcagacatgcaaaaaacctgaaaacatatctcaaaaggccaatctgcaatagtgatgttatctgcaggagtaattggggaatttgcatatcttgtgaccagcctacaccttagcagaattcaggctcctctcctccccatagactggggctctctcatggctttacaaaggtggttgacttttggggaggggctattatcatttaaaccataacctaaaagtcttccaaagttatcttggcctcagcccaggagtaattaaggcagcttgaccactaaaggtaagagcagagatggctaaatcagatctccttcactgccataattttctcactgatacaatttttgcaaaggcattttcacccactacccaactgtgtcattgtagcatgaaggcagccatagaaaggaataggcatgactgttccagtggaactttatgaattaacactgaaatggaaatgtcatacaattgtgacatgtcacagaatatttcatttttaattgttttcaactattcaaaaatgtcaaaatcatttttagcttggtggtggactggatttggtccagagcagtagtttgcctgcctctgttatagagtaacacatctgagcccatgagagaattgatcctgtaccttgggtaatgctcttcctctctggctcctttctacacctcagtcacttttcccctgcaagagtgttgtcacattagactgtaaaattggatcacttttatatttcatctctaacatgccttatttaataaaagtcattctaggtatgactaaagttccagggctaacttagaaaaggactgaagagaagaattccttctgacaaatgcggacccagccacaaatgccagtgatattgtcccaagtattggtggcttgggttgcacttgataacagagggcaaaagaaagtataaattttgcttgttaacatagctttagtggaaaatacagaaaatgcccccaaactccatgctaagatcatgaactaaactgttacaatgaaaggaattacttgggtttctataaaaacagctgcctcaaggaatttgccacattccttgggtctgcctgagctctggtggcccactgcttggataggcctggtttgtttgctaacttaacatgcttgcttaacggccaaacattcccttgaaattcaaggactttctgtcccgctgacactgtttatttgtatcagtagagtggagggctctctggtgacactctagttttttctgggttataagcagatgcaggtctgtagtttttctgacttggatggggccaatgggtctaagccaagaggaaaatgcttttttctttttcgtgtttatttccttttttttttttttcctatcttgattggagtacccttagaaggaaaaggagagccataatcgttctctggaggccaaaagaaggccgaaggatgccaaaaattgtcacagtggtgacttttggctggagccagtgcagaatgaggggctatgagtgtgtcactagaactgtaatccagatctcttccatgaggtcaggaaccctgattcgtattgctttttccatgctgtagaacatgacaccccactcaatcacttgtgctggttcattgttacttgttatagtagtcattgttatcaagactttttggttgtaagtgtcagaaacctaactcaaacagagctaagcaaaaataaatctataaataaatataattagctcaaaagtctgaactcactggattgatcttcagacataattgcatgcagtgttcaagcagcagctaccatctctccttcccttcctctctcttatctctgctttcctctgtgttaacatcctgctctgataagctttctccatgtggaatgaaagacgggctccagcctttccaggctcctaagttccttgcagctcacggtcccagaaggaaagagattgtctcccagcatctgtctccataaaaagaagccaccgtccttgcttgagtcatgttctcactcttggacttagcagagtccagaggggcttggatactctcacttggatactctcaatacgtgccagcaaggggcacatattcacccttcattgggcaaggtaagcctgttaacagtcccactcgaatcatggggagtaagcaaaaggaagttctgaaaatgaaagaatgtgggacagacataaaactcaaagctgtgcactatgctagtaaattattcttgtgtacttaatatgaatatggcttttataaacagtaagcaaatcagaagccaccctgtgaatcatcagttatctctagacatttctggattccttctttattccctgataatcttctttccttcctttcactgcgttgtaagtggaaataacacaagccaaaaagaccctctcctgctctcaatacacacatggtctagttcaggaagacaacatataaacagcaggcatacgagcaatttcagtagactgtgatgcctgcccagggtgctcgtggtctacctttcatggaccaaagacaacaggaataagagcattcatcttcctctgctattgtgagaatatagacagtgcaaagacttggatgccagtgctaacatccctgcctgacctgactttgagaaaaggaccgccattttcagcacaacccacaggttctctaaatactcaaagtgtgaggctagcagataaatttggcttatagagggagcttcataccatggttagaacacagcaagaaaggaacaaatttttaatgtattaattgaaaatcagatttctcagctgggaagaagatattagctggaacacacacaaaaaagtatttttaaaggtgcccttttaaaggctgccaaaactcacccaaagtagtattcaaatatgaagacagatgtcttttcaagacgggaaattttagttccgagtatgaaagagaattttatttatttgttttttcccttgccttttcaggcttttcactgacttcgaggggatgagggtatgtgtgcttaaagtagatgccagagtgtcttcttggaacttcaggtttccatgagtagaaggaagtgttgaatgaatgaggacccacggccctgtccagtgtggacatgccataaccctgtgctgagcttcctcatctgtgttctgggcttacattgaatatggcataagcaaccccgaagagccacaaaactctgctctgttaagggaggagggcaagtcctccctggaaggggttgtctcatcaaccaggaaatggtggtcaggatggatacagtagcatctatacctcagcccccttgaagtatcctgatgtccactccccacaaaatctaggccttccataggaagtcaagaggatattgtgctgatataaatttggaccaccagtgagtttgccctcagacctggtaagaagtgcatatttcagatataagatattgctctggcctcagctacatacagtttccataaaggaaaactttgaaggactgcctgcaggaaaagaatagcctcgtgttgatgtatctagggacagaactctcaggcaggacaacagcttcctcaagtcttgtgactacactctttttcccaagatatctcattgcatctttaatttagctcctaattcaaagccaagctcatggactgtttcaagctctggaccatgagcttagctctgaattaggagctaaattaaggatgcaacgagacatcctgggagaaatagtatagtcacaagacttgaggaagctttagtgaaaagcagacccacccagcatgtgtaattcttccatgaggtttcatctcacagtctgcatgtcttgcaagtgggcttagggccacaggggcaggagctcttggtactcagaatgttgtctagaagtttggaggagagagatcccttccaacctaggtcaaaaggcagaactggtaaaggacttgcagacatgataactttgagcacaatatctgagagagcaatccatggaagtcatttgaggaagagcattgtagacaacaggaatagcaagttcataagccctgacctcaggaacctgcccggtacattcaggagcatcaaggagaccatactggccaaatggcacaagtgtgaggaaagtgttggtaggaggtgatttcagagggatgcctggaggccagatcctggagagtcttgtaggtcattgtataactttgacttttactttgaatgagatggtaagcacttatgagcagaaaagtgtatgatttaacttacgttctaaaagaagtattctggctcctgtattaaaaataaactgaagggcaaggagagaggtggagagacccattgggaggctaacgcagacatttatccaggcaaatatcacttagacctcggtggtgcaagtaaggaaaatgagaggaaattgcatttataaaaatctcatttaaagatagagtcaacaggattcatcattggattggattggagtaaatgagagagagagggaaatcaaggatgattcaaagttggttttgtttttttttttgttttttttttttatcttgagcaactggagagatggagacaacattttaaattactttgttctttggtaacatggcagtaaacacacttataaactgtattacaggtggcaatcaaaataagcacctggctgatttgaaatatggtttaaaaaaaattacaaagtaaggaagatgaacttgtattgttctgcccatgcaaacaatctgtaaaactgtgtgcatttatatatttttcagtcattaatatttacagcgggagagaactgtttgtgaaatcatgaattatcttttgtttgaattttattttattaatgagttagaagtacctttgtaagccattgtaccttttttctaaaggtgagagcctaaaactaccatgttgcaatggaataagccctggttctagcttcacgccctgggagtgacttctattagctttggaatctccggtaactcctttaatcctttgaattctcactttctatgtcttaaaggtgatggctgcccatttcatcaactgtgaaatggcatccaagtcccaggtatcgttaagaaccaacggcttccattttaaacagaagttttgttaaacaaatatttggttttacaagggtattataattcatacccttattcattgttcttccttgctcccaatagtcgatgggttttttttttagctgtggcttatgtgatcaaagaggtgaaacaagttagctcaattggttatattctgaaattaataaggtgttctttttgcatgtgtatacaaattaacttccctctgtttcttggccacacacctcacctcagcttcacaaatgagtagaattgattacaacatgaatcagacaagagagtgtagatctatcactgttattgagaaagcagttcaaaaaacaagcattcccgcatgttagtaacatgtttttataaaagctgtaaatgtatatttattcatatgatttaatattttttatcttcagtttttattttaagttcaggggtacatgtacaggatgtgcaggttagttacacaggtaaacatgtgccgtggtggtttgctgcacagatcctcccatcatgtaggtattaagcccagcatccattagctattcttcctggtgcccaccctcccctgaaccccctcccctgacaggctccagtgtgtgttggtccctgcaatgtgtccacgcgttctcatcattcagctcccactaataagtgaaaacatgtagtgtttggttttctgttcctgcattaattcgctggggataatggctttcagctccatccatgtccctgaagaagacatgatctcgtttttttatggctgcatagtattccatggtgtatacgtaccacattttctttatccagtctattattaatgggcatttggcttgattccatgtatttgctattgtgaatagtgctgcaataaacatatgtgtgcatgtatctttataatagaatggtttatattcctttgggtatatactcggtaagggaattgctgggtcaagtggtatttctgcctctgggtctttgaggaattgccacactgtcttccatagtggttgaactaatttacactcccaccaacagcataaaagccttcctttttctctgcaacctcactagagtcagtaatatttcttcaaatatgaaggacttgacctcagatcctttatgatgatcataaatacataaatagataagttaaaaaataggaaggacagtgtgatactaaataactacaaaattagagatgtatcaaaaagtatttaggcactaaaatagttgagagatcattttcagagcctccaagagtttctatgccttgaattatttgagcatccagtgcaagctttcagagtccttgcttccttaaatataaaacaagaagtcagatacctttgcctctgacttctcagaggtctttgagcttgacagttctataattctatgagttttctacctagaaactattccttccattcagttaggaaatatattcaagtatattttatttaatcttaaactttggaatcccattttggtaagctgctgttatttgaaggtgttgacgtatcctctgggatctgagaaaattattatcaaaaccaattaaaggaatcatctattttgtgcgattggttttgaaatctgtccagtgggctctttctggaggcaaggatcctggttaccaagagactttgctgcaaataaggcaaactgggatgacatttggggttgggatccttctcaggaccaaatgggcacccatcatctttgggtctagaagactgcactggcataaagcagctgacttcctgtagccttgcagaaataacaatggggtgtgtgtgtgtgtgtgtagtgtgtgtagtgtgtgcagtgtgtgtgtgtgtgtgtgtgtacaatggtggggaacagttggcagagcaatgagcaagaaatgggaaacgacactcagaaaagcagcaacctaccctgagcaaatcaaagaatttcttagaatgcaacactagctgtgtgtatgaataattggcttgcaaatcacttcctctatttgcttgttatataataccaatcatttcagtgtcactgacgaaagcccagaagggaattaccacttaccagccagttttacatatggcttttgtgaggaataaggccttgaggatgagggtctaaatctctggcccacagatctggacaggcagatttcaagctgatcattacatatcttttgagagagacaatcccagacgaattggcctggggggcaacatgagaaggcaagacaaaagaacattgtaaagacttcacctagaatccaaattgtagttctctcagcaagttatcaagaagcaaattaactgctagattttgtaatccaaagattatttaatctgtttagctttgtgttggaaggatcgctactaatcatctcttttattaaaatatgataatgatagccatcctttattaagtgcttatgatataccaggcactttgtatacatgatttgccttattcagaataaccctgaaggatcaatattattgtctccatatcaaagagagggaaactaaggcatacaaaagttatttgctcaaggtcaaacagcatggtaagaggaactgcaatttcattccaggtcttacggataccaagtccgatgcctgccagcttgcacctgttaagtcatgtgatacttaggaaatgtacacatcaccccagtgcagaggcctttatccacttcccttcattttgcctggattgttgctgtgagtgagaaataaatgacatgaaatgatcatgtatatcactgtcttcagaggatggttagttccttgctctggattgtttttctcttttgttggatatttattttgacttctctgcaaactaaaaatatgcatgctctagtttctcttgggtacataactcccaatatattgtgaagaatgaaactggcctacaaagtttaattaagaagcagtgaactagagcttacttagacaatacttgtactagtgtgggttcatgttgtccatttgtctttagaggtgtagaaccttgaaagtcagctaattaatcactattactgttgtgtacagtattggcaatctcctatgctaaaattttttgtgatgatttgaaggtgggagggggcaatatttactaagtctctcaacctacatggcaatatctgaaacctgcttataatgtagtaatagcttaggcaccacctatttctgaaacataaatcatcccacaatataagcctcccagttttattcatgcgtcttaccatgtataaatatcttttaatataccatttatttccttgagggacagttatttgtagcataaatctgcctggataaaatagtaaaaattgctatgccccagtgaattcagtttacaaaagcttacatacgtgaatgagacattggaaatgtggtttatagttaaggagaatggatcacacggattatacctgtataacttccctagaaggttgataccactaagatattaacaccaaaaaactgaaaatagtatttttcatcttactttgttatgtaccctttgtgaatttctgaaaaacacctttctattatgatgggataaattacggtgtggtaacaaacaagcccaacctgtttgttccggtcaactagttgctttataacaaaccaccccaaaatttgtttaaaacagctatcatttgattgtgctcacaagttctgtgagttaggaaataagacacaacacagtggtcttatgtctgttgtgtaatgtctgggttctcagctgtgaacactcaaatggcttggaaactgaaatcagctggaggcttccttattcatatgtttggtgcctggctgggatgactcagattagttggggctcttgacaaaagcacctatacatgaaccctctcaggagccttggctctatggtggctggattctgagagggagcatgcagagaaaagaattccaagacaatggatgctctaagagaagctacttggccttttctgatctagtcttggtggtcatgcagcatcacttttgccacccagatcaaaggggaagaggagacagactccacctgtggatgggagagtgtcaaattcacacagaagttgtatgcaagctattcttggtcatcttgctcatctatgaaatataccctcctccatgcattgacttacaacaagggtttatttcttgctcaaagtctgctgtgaatctaggcaattctccagagcagctgttcttttgttggcttagcaatccaagctgctgcttccatcttacagcttttccatatcaactcatgattccacaaccattgctacgaggcaagagtagtatggaggatcacacactactcttagaaaccaccagctggaagggacttatatcactcctgcttacatttgatggctcacatagccatgcccaaattcagtagagcaagcatggccctcctgtgtacccagaaaggaaggagagctagaaatattggtaaatagcaatattgtttaccatagcctcagagatattgcctcgtggtgaaaccctataattcccctcaattctgatttttgccctttatcaaatcattttattcattccttcatccatccaacaaagatgttttatatgcctactattagcaacaatcagtagcttgttcctggagggaatgcagctgctccccgccaaaacaccatataattcactctagaaaactaaaatttcagatgctttgtcattgattattgtggggagaaaatgtctctttcagctccgactttgtcctgtctcctctaaggcatgtgaaataagatttttttttcctattcttacctcctatggtcccattttatggttttcatgcactactgtcagtcaaatatttatcatatgtctttcaatatctttccaatatttatcatatatctttccccttgtaggccttaactttatgacccactattaagcacgcagctgtatttccagaaaatgtagatggtttaattcaatactgcatggcaattaactgtcttataaattaaatcattttaatccatcttagagttatcatgcataattagtctgacagcacaattctgtttgttgttgttttaaaggaaatttagatatcaaggctgcaaagaatgcgtaagtctaggcagaaggctcttattttccaaaagcagagcccatcgttgcatttcaacaatgaccgcaacaaaaaccatcaggagctgtttggggcctgtttgtgctttagtcttcaattagaaaaaaatgtgtttctgatggaaaaccatagaacaatcctcactctgtggtaagaaagaataaagagaaagaagtgggctctatgatagactgaagcaagaatactattttagactaggtagtggccgggcgtggtggctcacgcctgtaatcctagcactttgagaggccaaggtgggcgtatcacctgaggttgggagttcgagaccagcctgaccaacatggagaaaccctgtctctactaaaaatacaaaattagctgggcgtcgtggcgcatgcctgtaatcccagctactcaggcgcactggctcacgcctgtacttgggaggctgaggcaggagaatcgcttgagcccaggaggcagaggttgcagtgagctgagattgcgccattgcactccagcctgggcaacaagagtgaaactctgtctcagaaaaaaaaaaaagactaggtagttatcttcctgggtggttttggctatgtagaaaatcactcttactctcgattaatttatgtaccaaatcatgctttgaaatatcccactgaaaaggtctaaattattgatatcttgggtcaagttctgacttgaaggcaaatagtaggaaatacaatggcatttattggaggcacacactacaaatattgtagtatctttaagatgtgtttaaataaacaagtagatgataaaactataaattagagtcactaagactctctagcagagacccttaccttttgaagtgcaccttaaaatggcaacaacacttatcagaaattccataagaagcttagttgtctgctactctattgcagtatcatatgtgtgagctgcatgaaaactggatattattattatcaaaggttattatcaaatggagcacaattttattaataacaatattattattatcaaaggttttaatttgctaaaactatacagcttccttaggtcttccaaactaggtcagccagttaaccctcagatctggagtaccacatttggctgagtcagaagaaataaagatgctctcaaaaccacaaacaaaactgataatagacattctgataactttaactcccacagtaataaatcttgggtcttttaaagttggtcagatgtacacagagctgcttactaattatactaaaatagttactaagcaactcgacattttgatttccaagaatttcagataaagattatgaactttatttatttggtgctttagagtccaaggcactattttacagcctaaagctgtatttctcaaggccatcttcttgcattcttctaaaacttaagagggatcatctgtcctcaaaaatataagaaattctgtaaatgtgtatttttgtgtatatatatatttgatatttaaaattctgtatctatatatacttccaagaccccttagaacttacacggtacctgtaatttgtttcttttttatacttaagtacaagtaatgttagtgatacatttaaaactaggaattaccttgtttgcaatatcaaatttttgtaaaatattgagttaaaaaagtctcctaaaattaagatttgaactattataaatggcttcaaagatcctttcgtttctaagagaaggaaggaattaggatttattgtgcatgtatttcataccaggtgctcatctacagttattgaatccttgcaacaatcgtatcaggtaaacgctgttattcttctcttacagatgaaaaatctaaaccttctaaaatgaaagtttgtccaagttaacatgaccaattaggagagcttggattccaacccaaatctgttcagtatcaaagctcactctcttccatccttgccccttctcagctcacatagtagctttcagaaaacagtagctatctaccccagataaaattaagcctttttttccttaggagaggctagaaactgaatcttctaccccctttattggcatcacacaggcacaaaaatcaccaattctcaaaaaccctatactcccaagttcaacccaaattgaatggttggaatattgttggtttgtatggaataattaacccacatctaaaaattaattatacaaagtgaagtggagattgaagcagttttctagataattaaggcaaaaataactgcaatttttttaaaagacagtttgaaatatttagaagggtagattgcaaaattatccaacttaaggtagtcatattcagggagtttagccaaaacacctctgaagttcattgccttacaaatgagtataaaacttaaacctatgattaattccctgttgtttttctatctgtattatacatataaatatattttatatattgtcctcctgagatttcaagagcaattttcttctaattcttctaatttcttctatggattcaccatagtgaatccaccgacacgtctaccctgtgacaatcttgttctccatttgattgcatgaaaaataccatatgaatttgacaaatcattggtttttttgtttgtttttctcttttgctgcatatcattgcctatgcttcttgagcactagaatatatttgtgcatgtataaaccaaggcctttcttctgaaaattaatagtactttgaatctcttctatattctggttcttttaaactgtggttgttttaagtttgcctctcttgttttaggatttattctttattttgaggccctgatttttcacaaaacatttttctcaacgaatcctgagaacactggacaatcatagcttttagctatcatgagtcccattaccctttggcctccagttaagctctgtcctgcaagacataaattgtctgattatcaactcctactttgagtgaaaaatggttgaatgaaatgaatatgcagttcatttcaacaaagcaagaaatttgctgtttaaaattgtgtttttataattcttgagatggaaatatagcagacctctgtgaatctgagaaggcatttcatgcttccagaaatgaggggagaagtggcaatgatattgctcatgaacaattggaagcaatgatactagagtatgcagcaaatctcagggagatttcagtggtacagtaactggcctcacaaaagtgggatttattgcattaaatctttgctgtcctttctggctggtttgatatttaagaaattattaaacataaaattgtatgagcagttacctatggtaggacaaaatggactgacctctaatggcttggtagatgggataattttgggaagagagagtggagctcagttcagcatcctactctcctcctcaacatcatttcccattcttggcccttgagtttagataggagttgggcatgtgtgtgtgtgtatgtgtgtgtgtggtgaagtgggtagattcctgttcccaacccaattagataactccacttccatctatcttccttgcatcttctccagctcatttgcaaaagaatgaaagaagccttgcttcaaaaaggtttagagggctaaataagagcacaaactggattttctgaaaactgacctgattgcctgggtaattaaactgtcactccagcaaaagcatttgtctccaaaaagtactgaggttgtctttcatcactctaagtctagacattctgaaacctccatcctctcctgcagagagaggaattaagtctccacatttctaaaccattgacagtctgtggggtgccccattgtgttcctgacttcctattctcagaaggagttataacgatgacaatgatgcatgcatgagacatagaggtcctccccagccctcggttaggaagtaaggcagccacccatgtactgaacacaatagtgctttggaaagagctctgttaaaagtgagtctcaaaaatgtaaaggcctttacgagaggaacttaatctccagtgtgataaaacgatgcacacattacaaggagatggatgttatgaaaacaataagtacacccaagagtacacgtacaaatctgcattgcaattgatttatttggatgcctgtttcttcctacactatgagctccttggggccatgaaattcatttgttttatctatatatactctctttgatatcccccaccctgacagctagtgcagtcctttctaaatagttgttactaaatatgtcaaatcaaatgcctacaaggactggttggtagaaccagattctggaagtgaccaagcaggtctagcttcataagaatgccatcatcgtagatttgagggtcatgatgaagttgtactaggatttatggaggttctttgtcaaccagttcacaccaccagtgacttaaggaaactatatgtcgtctattgggaacagtcctgcttaaagcaattagcagggacaattaatttggagggaagtctctctccactcaacagcattcaaataccctctgcattagccatgttttgaaaaactccaattgcctgagtcactgatagacaaacagaaatgcagactattttgtatgcagttttataaagaagtttctaaccagagaagaaaggtgttattttgaaatattaagctcttagttgttctttcatttcagtgaacatttgttgagggcctgacatgagctaggcacatggcaaagttttagagatgcaaaggtaaattaagacccctgtgttaattctcatgcgggcaaagcaagcacattttttaagttgcaataatgcaacaatggtggtgtgtacatagtagggcaaaagcatagagaaagccatggaaatcctcaagccaagttcaaagagtcctctaatgtatggcataccacaacaaggaccttcaaagggtgcatttggtaagaaaaggcaacctccaaagattcatccaatcctaaggtttcatagagtagggacttcttcccttagctggaaaggaaagaagtcatttggtgtgcagtagacataaattaggggccgtccactttttcttgcaatgattcatctaatggaggagcagaccctggagagaaacatatctcttcttgtcttcattttgttcttcttttattaaatcacccgcaggacaaccggatgctccagcaatagattatagaaaaaacagatgggtatttctgtgcagtcagaaggctcctgtgcccttttccagcataaaacgtttatgaaaatcaattttcagtgcctgctgaaccaggctgatgtgagaactagctttccacagttcataatattcactccgggatgatttgacagggctgatattttatcacgaatacaaaggagatgagcaccattctcctaatatattcattacttgtctcaccaccctggtaaataatatgcatatggtaatttgagagacacagtgttcccattgctcttttttattcccagaactctggctgtcttttctaaatgctgcaaatcaaaggcaaagttacctcacgcacctgtagtcccagctactcaagagacagaggctctagaccaggacttgaagttcagcctgggcaacacagtgagaccctatgtctttaaaaaaaattgcctaaaaatttggccaggtgcggtggcccatgcctgtaattggaggaactttgggaggccaaggtgggcagatcacttgaggccaggagtttgagaccatcctggccaacatggctaaaccctgtctctactaaaaatacaaaaaaaaaaaaaaattagccaggcatggtggtgtgcacctgtaatcccagctacttgggaggctgaggcataagaatcacttgaacctgggaggcagaggttgcagtgagccgagattgtgccactgctgtattccagtctgggtgatagagcgagactctgcctcaaaaaaattaaattaaaatttaaaataaaaaattacttaaaaatttgattttacattcctcctattctcactttctggtgcccatacaacacataaattacattcttctctatgtttacctgcatctctagggaacaaagcccctttcacttgttctgttactatagaatgttctacaataccccaataaagattcattcatttgttcatttacaaatatctattaagcacctactgtgtgtcaagcagtatgctaaatcttaagcatgaaacaaaagaaagataaaagtatctgattcagggactggttgttctgttgttctgggttttttttttttttttttggaagcttgttgaaaatctgtggcatcatacaaaacaaaaaagaatgcaaaactggtgccttaaatagaaatgtattaataatgagtgttagagctaagagaaggcaaaatgtctacagaacacatgatttcaattaacaacagtgagtaaacgaatgatctggaaaaaaattatgatcgggcccatgatttttttttgtcgttttttaaaaattttgtttgtttttctcatactcatattattctaaggcccattgattttagaaagaaaatctgttttataaacttagcatattaaaag

SEQ ID NO: 179 - DNA, 2723 bp, Homo sapiens
ggaggctgaaatccccagacgccggttttctgggctgggctttctgcttactcactccttctccctctttctggattttaccgaccgttcgcgaaacagctttccacacaatggagcttcatgtcctcgtgcaggaagtactcatcgactgatgtggcagactttgctccctgacaaaactaaagaactctcctattcatggaggcgaacactgaggatgctttccacatgaaccctgaagtgaacttctgatacatttcctgcagcaagagaaggcagccaacatgaaggaaaatgtggcatctgcaaccgttttcactctgctactttttctcaacacctgccttctgaatggacagttacctcctggaaaacctgagatctttaaatgtcgttctcccaataaggaaacattcacctgctggtggaggcctgggacagatggaggacttcctaccaattattcactgacttaccacagggaaggagagacactcatgcatgaatgtccagactacataaccggtggccccaactcctgccactttggcaagcagtacacctccatgtggaggacatacatcatgatggtcaatgccactaaccagatgggaagcagtttctcggatgaactttatgtggacgtgacttacatagttcagccagaccctcctttggagctggctgtggaagtaaaacagccagaagacagaaaaccctacctgtggattaaatggtctccacctaccctgattgacttaaaaactggttggttcacgctcctgtatgaaattcgattaaaacccgagaaagcagctgagtgggagatccattttgctgggcagcaaacagagtttaagattctcagcctacatccaggacagaaataccttgtccaggttcgctgcaaaccagaccatggatactggagtgcatggagtccagcgaccttcattcagatacctagtgacttcaccatgaatgatacaaccgtgtggatctctgtggctgtcctttctgctgtcatctgtttgattattgtctgggcagtggctttgaagggctatagcatggtgacctgcatctttccgccagttcctgggccaaaaataaaaggatttgatgctcatctgttggagaagggcaagtctgaagaactactgagtgccttgggatgccaagactttcctcccacttctgactatgaggacttgctggtggagtatttagaagtagatgatagtgaggaccagcatctaatgtcagtccattcaaaagaacacccaagtcaaggtatgaaacccacatacctggatcctgacactgactcaggccgggggagctgtgacagcccttcccttttgtctgaaaagtgtgaggaaccccaggccaatccctccacattctatgatcctgaggtcattgagaagccagagaatcctgaaacaacccacacctgggacccccagtgcataagcatggaaggcaaaatcccctattttcatgctggtggatccaaatgttcaacatggcccttaccacagcccagccagcacaaccccagatcctcttaccacaatattactgatgtgtgtgagctggctgtgggccctgcaggtgcaccggccactctgttgaatgaagcaggtaaagatgctttaaaatcctctcaaaccattaagtctagagaagagggaaaggcaacccagcagagggaggtagaaagcttccattctgagactgaccaggatacgccctggctgctgccccaggagaaaaccccctttggctccgctaaacccttggattatgtggagattcacaaggtcaacaaagatggtgcattatcattgctaccaaaacagagagagaacagcggcaagcccaagaagcccgggactcctgagaacaataaggagtatgccaaggtgtccggggtcatggataacaacatcctggtgttggtgccagatccacatgctaaaaacgtggcttgctttgaagaatcagccaaagaggccccaccatcacttgaacagaatcaagctgagaaagccctggccaacttcactgcaacatcaagcaagtgcaggctccagctgggtggtttggattacctggatcccgcatgttttacacactcctttcactgatagcttgactaatggaatgattggttaaaatgtgatttttcttcaggtaacactacagagtacgtgaaatgctcaagaatgtagtcagactgacactactaaagctcccagctcctttcatgctccatttttaaccacttgcctctttctccagcagctgattccagaacaaatcattatgtttcctaactgtgatttgtagatttactttttgctgttagttataaaactatgtgttcaatgaaataaaagcacactgcttagtattcttgagggacaatgccaataggtatatcctctggaaaaggctttcatgatttggcatgggacagacggaaatgaaattgtcaaaattgtttaccatagaaagatgacaaaagaaaattttccacataggaaaatgccatgaaaattgcttttgaaaaacaactgcataacctttacactcctcgtccattttattaggattacccaaatataaccatttaaagaaagaatgcattccagaacaaattgtttacataagttcctataccttactgacacattgctgatatgcaagtaagaaat

SEQ ID NO: 180 - DNA, 1869 bp, Homo sapiens
atgaaggaaaatgtggcatctgcaaccgttttcactctgctactttttctcaacacctgccttctgaatggacagttacctcctggaaaacctgagatctttaaatgtcgttctcccaataaggaaacattcacctgctggtggaggcctgggacagatggaggacttcctaccaattattcactgacttaccacagggaaggagagacactcatgcatgaatgtccagactacataaccggtggccccaactcctgccactttggcaagcagtacacctccatgtggaggacatacatcatgatggtcaatgccactaaccagatgggaagcagtttctcggatgaactttatgtggacgtgacttacatagttcagccagaccctcctttggagctggctgtggaagtaaaacagccagaagacagaaaaccctacctgtggattaaatggtctccacctaccctgattgacttaaaaactggttggttcacgctcctgtatgaaattcgattaaaacccgagaaagcagctgagtgggagatccattttgctgggcagcaaacagagtttaagattctcagcctacatccaggacagaaataccttgtccaggttcgctgcaaaccagaccatggatactggagtgcatggagtccagcgaccttcattcagatacctagtgacttcaccatgaatgatacaaccgtgtggatctctgtggctgtcctttctgctgtcatctgtttgattattgtctgggcagtggctttgaagggctatagcatggtgacctgcatctttccgccagttcctgggccaaaaataaaaggatttgatgctcatctgttggagaagggcaagtctgaagaactactgagtgccttgggatgccaagactttcctcccacttctgactatgaggacttgctggtggagtatttagaagtagatgatagtgaggaccagcatctaatgtcagtccattcaaaagaacacccaagtcaaggtatgaaacccacatacctggatcctgacactgactcaggccgggggagctgtgacagcccttcccttttgtctgaaaagtgtgaggaaccccaggccaatccctccacattctatgatcctgaggtcattgagaagccagagaatcctgaaacaacccacacctgggacccccagtgcataagcatggaaggcaaaatcccctattttcatgctggtggatccaaatgttcaacatggcccttaccacagcccagccagcacaaccccagatcctcttaccacaatattactgatgtgtgtgagctggctgtgggccctgcaggtgcaccggccactctgttgaatgaagcaggtaaagatgctttaaaatcctctcaaaccattaagtctagagaagagggaaaggcaacccagcagagggaggtagaaagcttccattctgagactgaccaggatacgccctggctgctgccccaggagaaaaccccctttggctccgctaaacccttggattatgtggagattcacaaggtcaacaaagatggtgcattatcattgctaccaaaacagagagagaacagcggcaagcccaagaagcccgggactcctgagaacaataaggagtatgccaaggtgtccggggtcatggataacaacatcctggtgttggtgccagatccacatgctaaaaacgtggcttgctttgaagaatcagccaaagaggccccaccatcacttgaacagaatcaagctgagaaagccctggccaacttcactgcaacatcaagcaagtgcaggctccagctgggtggtttggattacctggatcccgcatgttttacacactcctttcactga

SEQ ID NO: 181 - DNA, 96389 bp, Mus musculus
  misc_feature (455)..(570): "n" at positions 455 to 570 can be any base
  misc_feature (8609)..(8909): "n" at positions 8609 to 8909 can be any base
  misc_feature (15838)..(16208): "n" at positions 15838 to 16208 can be any base
  misc_feature (25601)..(25620): "n" at positions 25601 to 25620 can be any base
  misc_feature (47215)..(47234): "n" at positions 47215 to 47234 can be any base
  misc_feature (91841)..(91893): "n" at positions 91841 to 91893 can be any base
  misc_feature (95110)..(95784): "n" at positions 95110 to 95784 can be any base
agccagtcttgtaagcctttgttctttcttggggctatggccgctcggcactcctttgtggcttgctcatagatgagctgttttatcagaggcgcagcttgctctgactctccaaaaatacgctctgctgcctctgtcattttggccacaaaatctgagaaggattcctgaggtccctggacaacttttgttaattgaccagtggtttcacctgctcgggagagcgcctttcaggccctaatagccgtggaagaaatctgggcataagctccccaatggtagtttgtctgatcagcagaataagctccctgacccgttaacaaatcaaaagtccaatctctctgctctggagtcaaagcagctgcgtttgctcgggcctgcgcttgtgcagcttcgtgccaaagcgctctctatttcatatatttgcccatactagggagagcggcttttacaannnnnnnnnnnnnnnnnnnnnnnnnnnnnnnnnnnnnnnnnnnnnnnnnnnnnnnnnnnnnnnnnnnnnnnnnnnnnnnnnnnnnnnnnnnnnnnnnnnnnnnnnnnnnnnnnnnntggttccgtatttacggaccgactcggcaatttctttaatttgtaagtattctaccggaagcgtggacacgcccaccctcggctccttcaaagactggaaatgcctgttgtattttcctttgttcctctctgggaatgaatgagtctgcgcactgcctctctgcgcactgcctctctgcgcactgcctctctgcgcatctctctgcgcattgcctctctgcgcattgctgacgcactacgcagggcgggggctccgcatagggcggaccttgaagccgactgccctgaggccaatcagcaaactggccttcgccagccgcttttggcttctttaactgattagctagcactttacctggctggtacccttttttctcataatgagctgctttttcctcccagtctgtttcctcagaggagaattcttcatctgcttcagagctaccaagagctggctccccgagcccatctagcgatgagcacaggctccttttcctagagacctccgctaattgatctttctttttttccctttttcctctttttcttctaatctctctccaggtattcctacctaaccttaactttttctcgggtttaagacccttggaaaggcctgtatacttattttgtgtaccatatttcctttttgttcctactctctctccccactttacttctgatagcttgtcctgaatttcctctagaatttttagccctatcttaatcacttgataacatgtgaaaaggaacaaaagggctcctaacaccagaaaaaattcaaggccaaacatatttcactttacttctgatagactgtcttgaatttccttagaaagtttaagatcagacttacctcgtaaagctgtactcactggtactctcgttccccagctgaaaagttctgaattcatacagttgaatccttcttaacagtctgctttacgggaacctttattaccgcgacccgcagttctggttctggaatgagggatcttccttgcgccagtcccgagttttttctcgtcccgggtttcggcaccaattgttattaaacgcgttctcacgaccggccaggaagaacaccacagaccagaatcttctgcggcaaaactttattgcttacatcttcaggagcaagagtgtaagaagcaagagagagagaaaacgaaaccccgtcccttttttaggagagttatatttcgcctaggacgtgtcactccctgattggctgcagcccatcggccgagttgacgtcacggggaaggcagagcacatggagtggagaaccaccctcggcatatgcgcagattatttgtttaccacttagaacacagctgtcagcgccatcttgtaacggcgaatgtgggcgcggctcccaacaagcttatatggtattctctctctctctttcttccccaagggagtgtgaggcttctcttcctatcaccagcctttcacttaagccagtacctcagctgggtttgtgtgtcctcacccacccccaccccctttttttttccaagacagggcttctctgtgtagccctggctgttctggaattccctctgtagcccagggtgtccttgaacacggagatctccctgcctctgccttctgagtgctggaattaaaggtgtgtgccaccactactgggcttttttttttttttttttttttgagacagggtttcctttatgtacccctggatgtcctggaacttgctttgtagatcaggctggcctccaactcagagatcttggtaaactccacagagggagtagctacaaatggggtgtgaagaagaggaccaaggatcaactcaagaggatctaagggtttgagactgagaactgggcaaggtcaacagaagaaataaggaagctcagggagaaagcagacctcaggacctgaggactgtgatattatcaagtagacccgagagagagaggctgtctgtgggagtcaacttaggaactataaagctaccaagagggaaatccagagaagacatgctgttgataagctggatgggtaacccagctcgttggatgttgcctcagaagtatgaggacccgaatccccagagcccacgtagaagctggacgtggcggaacacggaatgccagagcctcctctgcttcctgtctggccatcccctttccagatatctcacatatggagaagggcacagtgacctaaagacagcttgggagatcaggaaggtagtcagcgtctgggcataagggctggcttaacttacttagccatccttgcccataaaaagaagggagcactagaaaccattcccagtgatgaaaaagacgaaacaagacaaactcgcagaagcacatagcataggaaagagctcaaagtaagtaggtagttttggggtttgttttatttgttgttaagacagaggttcactccagtcagtggtggcgcacgcctttaatcccagcacttgggaggcagaggcagacagatttctgagttcgaggtcagcctggtctacagagtgagttccaggacagccagggctacacagagaaaccctatcttgaaaaacaacaacaaaaaaagacagaggttcactatgtagccttgactgacctagcattcactatgtagaccaggctgatctagaattaacagagatcctcctgcgtctacctgccatatcctgagattaaagtcctgatgcctggtttctaaaaacgtatttttaaagaagtcaggagggcaccagggacaggagagcaagtgacgctcctgctacagggacttctgtaggaaaagatgtcccttgtaataaccaagctcctggcagggacagaggaagggtagtagaagactcaggggtttggagcagggaaacgggaaaggtggtgctttcaaaatctgaccctggcttagcgctatcaccatctggttcagtgaggctctggcgctctctctctctctctctctctctctctctctctctctctctctctctctctccctctcttccctccttcgttcctgaggagaaacgctgagtcagcgcagggcttctctagctcccagaattttggggtgtttttccagaatccagggggcttgcccctctgccttgcgctgcctgctgcttctctggccagaagcagttagacccaaacagcagcgggataatgacctcctgacagcataccctttgaggagagtcagcaaaggctgctgtcacacccaaccactctgttccaatctagatgggtcaaagtcctctgtctcttttataactcacatctccatccccattccaactagcctgctatggtcagtatgtctcccagctagcctccccttctccattgtcagctccccgggactgtccgctgtccattctctggtactcaatggttttcagatatcatttaaacctagctcaccttgctgtagctccacggttatgggaagggccttcccactttcccagcctcaatctatgccacagccttacactgacttcatctgtcatcatgatctaaagtcatttatgcccatagctctctgccttggccatttgccagcttttcttgtactatcttctcttcctcagatattccattcctcatctctcaaaaaatgacacggaactggaaggttccccccacccccatattgtccctccaaaatttcctaatgagttggatgtgcctccattgcagagtttccatagtaattggtagtttgtcacctctccccttattgttccttgtatcttagggtaacagttgaggaatgtgactttctcattattagactgagagtttttccaaaatgaagatcagatcttgtttgtatctgtatttacacagcttagcataggacctatctacctcatactatcaactagtctcacattccttggggagtaatggtggaatgagtaaataatcttatcacaacaggggtgtcttgtggaaggaagacaacagagggtttggcctgtaatctcagtactttgggtggttgaggcaggatgagaaagataatggaaacacacaaatagaccccctcccaccccgccctcccaccccccaacccccagccacacggcaggctcctaaatctcagctactcattctgctattcaaggcttgggtctttcccaccggcctttccttttattcagacaattttcaacttttgctgagcagctgctgtagcagcaaaaggcagcaggacatttctggttgctgggatcaacagcatgaacgttttccatggatcaccaagcaggttctattttgagagtgtccaactcttaacagggcattagatctctaggcaaggcattatggcaaggggaaaactgccagaaaactgtagtcaggaaagcagtgaagccaagactaggagaccactaggagtgcatgccagtagtaaatccagcacttaggagattcagggcaaatgatccagagttcaagtttggcctcagctatataatgagttcaagcccaacctgggcttcatgaaaccctatctcaaagttacaaagtaaaagttacaaagtagccgggtgtggtggcgcacgcctttaatcccagcactcaggaggcagaggcaggcggatttctgagttcgaggccagcctggtctacaaagtgagttccaggacagccagagccatacagagaaaccctgtctcgaaaaaacaaacaaaaaacaaacttacaaagctagtaaaaacaaatatattttaaaaactgttaggagggatatctgggtcctgaaccatgaaaatcccagagtggaacaaaagtatagccaaggccttgagattccctggcttgaaaccagatggaagttgaacatcagtcacatgacccaacatagctttcagaagcaaaaggagcaatgtatttaagtgtaccacaaaggtatctcacattgcaatgaggcagaattcacagacctgaacttcattaaggtcttctctctgcctgttagcactctcctgccctctcccctcaacctctcccagcttcccctggccttgacaaaatgctgctccttgacgtgacatagtacagatctattagcaagaagaacaaccacgttactttcttctcaattctaaagcctctagaaattccatctgagtggttcagtgtaggccacttgtgacaactgtcaaagaggaaccacagcacatttgtggctgtgcatatggtccctccagaaccttgtgagtctgggggaaagtcctaggaaagcaggagttgttcaggcatcatcacaagtgtttaattctggaagacaacagttagaccagactttaataaaacctgcctgtagcagccagtgtcctgagtccattcattccaaaggagcccaagccttaagcagcagataggagatgggggtgaggagaggggaaagaggagagaagaaagaagagaggggggggaaaagatttttctaggcttaaagatattttggagggatggtgctggtgcatgccttcagtcccaacaccgagaaggcagaaggcagaggcagaggcagaggcagaggcagaggcagaggcagaggcagaggcagaggcagaggcagaggcagaggcagaggcagaggcagaggcagaggcagaggcagaggcagaggcgcagaggcagaggctcagaggcagaggcaggcaaatctctgagtctgaggatagccgggtccatagactaactcaaaacaaataaacaaacaaacgaatctccaaaagaacccaaccccccaagggaataaaaagaaagaagaggaggagaaaagaaggaaaaagagagacagacagagagagagacacacacagagacagagacagagagacagagagatcctgtttaagcaggagctggagagctagctcagtagtttagagcatggctactcttcaagagaacccaggctcaattccaccacaactgtttgtaattccagttccaggggatctggcacccctcacacagatatgcaggcaggcaaaacaccaatgcatgcaaaacataaggaaatttttaaaaagtattttggagacactgcagacttaagcaccatacaggtatcagcatattgaagattctaaacaggacaccaagaaaagctctgtttaactttaaatcataatgatgtatgtatttgtgtgtggagtgctccttttttgcgtaacatctacaaatcatccgccttttaccagtcatgctctggagacaggcatacatcatcatctagttactttataaaggctgaggtgatccgtcagtgaatagtcttgaattaaaacagtattttccatacctgatatatttgcttttgaccttcctggagtatgtcttatattccctctctgtactattcttggatttttttaaaaaataaaagcagtctcattatgtaaccctggttaacctgaaactcactatgctaggctggcctcaaactcacaaagatccctttgtttctgcctgtggagtagtgagttaattaaaggtatgggctaccacacccagctgaatatttttatttaaaattaatcacccaacatcttaaaaaaaaacccttgaacttaaacagttattactgtgggttttatgtggtagttaagtgttttccgtcatacacattgaaatagatataaagcagtaaaaaatgtaaaagtctgtctgtgtggggccaaaagtcctctcaagtgcttatgaccatgtgtgggatcattggttggagaagaaagagtggccatgtggacatcactagccaaacatagatagaggcgtttagtctatggtgggatgttgggtggccatgattgggcctaggataccacctttgattcatcatcctggggcctgcattctgtttccatgactactagctggtcttcctgggagggacctggaaagcaaatgacgatgatcccaagtcaccaggggctggaagctaaagcagaggcactatttttcttgaaggctgaattatttcagcctaactgcagtaaatgggtgggaggcagatgctttgcttggtggcctgggattgcttttgacatgggaaagcggctattgaggagacactaatgcaggcaaaactggctctggcatacagctgtggagaaagagtgctggaatcaggcagacctaaacatcaaatgatacatattatctacaggcccttaaacaaagtctttttgtttgtttgggattgtctattaaacacaattatcgctgttgtcccgttgtccagatgaagaaactgggactcagagtggttaaacaacttgttcaaggtcatggaagaataggaaaattctgcttaggaaagcagaattgaaaaataggccagttgacttccaagtgtggactcttagccactgcattgttgtgtttgcctttgttgattggactcttctgtcagaggacctgttgattcctgggggctaagtgctgaacaagatggagaggtcctaaccctcactgacctcgaattatataaaggagacagaaaagaagtcactagctcccatatgggtaacttaacaactgtgataactgttataaaggagagaggcacatgggtacagcatgcggaaaggggcgtgcagcacttcaagcttggtttttcgggacagtttctctaagtagccctggttgtcctggaactcactctgtagatcaggctggcctcgaactcagaaatccgcctgcctctgcctctcaactgttgggattaaaggcgtatgccaccactgcccagctggcttgagttttgaaatattcacaagaattaaccctaagtgtttatcactcaatgtttatgaacattttccgaatttatttatatgggggattgagccagactggagatgaattcagcctgggatgttcttgcaaatccaattgctaatgtcattaatccctcaagacagtttgatagtggtcgatggtccacacccaggactgtgaggagtcagggcagaccttatagtatggtgttccctaaataannnnnnnnnnnnnnnnnnnnnnnnnnnnnnnnnnnnnnnnnnnnnnnnnnnnnnnnnnnnnnnnnnnnnnnnnnnnnnnnnnnnnnnnnnnnnnnnnnnnnnnnnnnnnnnnnnnnnnnnnnnnnnnnnnnnnnnnnnnnnnnnnnnnnnnnnnnnnnnnnnnnnnnnnnnnnnnnnnnnnnnnnnnnnnnnnnnnnnnnnnnnnnnnnnnnnnnnnnnnnnnnnnnnnnnnnnnnnnnnnnnnnnnnnnnnnnnnnnnnnnnnnnnnnnnnnnnnnnnnnnnnnnnnnnnnnnnnnnnnnttggaatattagccctctcacatcaaactaattcctgtctcacagtaggcgcttaataaatgtttataaaaagaacaaatgcagtagggtacttgtgacacagggctacatgactgtaaactggagctaaacctgactgaaaaattaaaataatttttaaaaatgggtgtgaagtgctgggcggtggtggcgcacgccttcaatcccagcacgtgggaggcagaggcaggaggatttctgagttcgaggccagcctggtctactgagtgagttccaggacagtcagggctacacagagaaaccctgtctcgaacacccccccccctacaaaaaaaaagaataaataataaataaatggatgtgaagtattccagaagtctggacaaaggctgtgaggagactccagctaaatgccttacggctgctggtgaactaagatcggggcagccaaggtacgtgcggatcaaacttgtctggctctagagatgcagaagctggagacacggtccctggccagcttagctgggtcccgccgcggcctttaaaggcctaccacgtggccgcccgggtgtccaaggtccagaggcggtgtccacgctgcgcctgcgtgctgctagagccggtgtcccgcctctgagaacgccagtcccgtagcaaggcagaaagcagagagtgggcggagttaagtccgtatgctaataaaggggcggaacttgcgaggcaaaaccggctctgtctcccggacctctaagagacccgccgcaaccctcagcctctttccacgagcgctgacgtcgacgacgacgtcccatttaaaagcggccgcgcaggcgcagtgaggggaaatgcgaacttaggctgttacacaactgctggggtctgttctcgctgtccgcccgcccggcagtctgtcagtcgcgtcgctaccgccgctgcctcctccactgtcccgggagtctcgggccggtggctgctgtcgccgtctgttcgtgcttctcaggagcttcgtccgcccgttcaggccgtccctgccgtccgcctctcttcccccgcgctgcctctgagcccgcagcgttcgcacgccggccgacatgagcggggaccatctccacaacgattcccaggtgcgaccagccggcccccgactcgtccccagctgctcgggcccgggccggctccggccccggccagggccccggtcccagccccagccggccgcgccgggttgacaggcccgagtctgcgatgaggggcggccggttggagtcgcttggatggccgggtcccgggcggagccgtcaagttggagtttggtggggggatggcagccccgggtaggccattcgcgggcctctgggttccggggcgccgggtgggcccgagccccggcccccggccgcgcgctctcgtccgccgccccggggcttcatgtgccggttgtttcatcttccctcttttctttcctcagatcgaagcggatttccgattgaatggtgagtgtgccccccgccccgccccaagtgtccccacacgccgctgcctgcctcccccgcgccgggccggagccgggcagaggacagacatggcgtcccagagactaagtcccggctcctcgctcaccggccccattgttcccatcgggccgcctctggaccccctttcccggggtctcagcacccccagatcacggccttctccagagggggcaccggagaccccgcgtcgaccgtcgctgggtctcgggcggcctttctccgccgggattcttcccgggaaagtcgccttgtcgacggtcgggacttagtctctgcgccattttctttttctctctcctctcctttctgtgcctgtgtctttctctccctccctcagctccttccttgagctgtccagaaagagctttctgcagagcagagccatataaatcacagacctcaccaaagaaggaaggcttagggacggaattatcttttattttttcttaatagaactttattttggaagttacttgctttctgcttcatgtttgcttgctttcttcttcttttttaatttttgtgattccagaacgaaagattcccttaggcagctaagggttttatgggttttttttgtttcttttgttttttgtttttagtccttttattttttaaatggtgagatgtttataatagcagttacagttcttgaaactaaagccatcttttgtggagttctttgtattttgggattgttttcccaagttgtgctgtttgcaaagataactccctttaaaaaagttttcaggttgtctgtgtgtcatctagtgtgagtgttggacttgagcatatattctttaaaaaaaattaaaagtattagtgaccagaacttcctattgtggcaaggtagagttttttgttttttgggttatttttgagacacagtttattgtgcttgttccgaaaggttgctgaattgctcatttagacatggtgtgctggccttttctttggggtcatagggagttttaaaaaagattttatttattgaagtagagtggccagccctgactcctgtcttcttcctcattcttctcaggggctgctatttttttcaggaattaagagttaactggctttcctcacatccttaggctcttgagccctttccagtcatgttttcaaaatatttccactaaagttacccagggaagaatgttggtgggtgtctcccaccaccccagtaagaagctcacatttaatggattttccagcaattccattgtagtatgctggaaattcccacagattcttatgggtccgattgtgttcagttagtttgggttctggggaactgagtgggagaagccattgagtaggttttctggtgcagcagtccatggtactggcctgcccaactgaaagccttatgtttatatttccaagttggtcatccaaagagagatgacactgagttagagactctgtctaggtaaagcttttcttgagcacctaatatatgccaggtactgtgctagaattgaacctgtcaccaaccacatctgtctttgttcaactcagcctattgggggagtcacatcagttaattacaaggtaggcgttggagtgtatgtgtacccaaaatgctttgggagcataaagggcttaattttatctgggggtggggaaatttcttggaggtgactgagcagggtgttgtataagactaggtactgagaattgtcaggggttggattatttcttgggagtccatcctatcaggcttttaaacgagggagatgagactgtcaagcatatagataagcttctttggaaagggggtaaagaaaggatgtggtagttgtggatgtaaaatggttttgagctctctgaaggaaggtaggaatttaatatagaaaatttatttgctttttagttgggcctagtatgtaatatatttagcaatgaaacaaaattgagtcctttttcctcttaagtttaacttccattgttcccatctaaatacaaaagagctattgaatctatgcatgattatgggctgggtatgttatctttgcatttttatagagtgaattgaactgcctatgttaacttttaggatgtatttccattttccaacaatgatatttagtatttattgggcacctaactgttcaggcttgaatctcatcttactctttggaaaggacccttaggagttaattacagttatctccatttgagatgaaactgagtgtactcagtgaagccatgaacctagcctctgtgcaaaccggatgatgctggtatgaagaaatgaagtttcctgttttgtatggggcaattaagagggaaagggaaaaattgatagcatgccggttactttttaccaaaatcttgaagaaaaaaagcagttttgtgtacctactaccttaaggttctaatgttgtagtgattgtctttgtggttattgtctggatgttagtgtcagtaactatttgctctatcaagcgtacactgttagctagtgattgataaatataaaagacaatttaaaaaattaaaactagtttttaatacccaggcttcttaattgatctttatagtgagaggatatttacttaaacatggttttaggtgagtctgaacaatcacattcatgaagtaaaaccacatatcccttggtttgcttcctcaaatcttctaagataaaaaagattttctctcctaactggagcggttttgttttgttttgttttaatagtacttaacatttacagccttttgtgggaaatttagaacattctgggtcatactcaactgctgtgaaatgttatttgtgtggtaaatctatatttaagatataagcaatgagctagtcacttcaggagcacagcccatactttgtatttccctttcacctgagtgaaagattccctttgtcagtagcactaatcatagtgagcttgaattattattatagtagtgcacaggatgcctagctgcacagctgttaacattagttgaaggtgctggtaatccttttctgtttcaagaactctaagttcctgtctgttttactggaattatggagctacacaacttcattatattgtaatttgacaatgtgtagattatgagtaggtctaatggatttaatttgaatgaagggaattgttttgattgtaatggttgtacttctgtgcttgctgtgcatgagttatgataggcattgaggaggctcgtgaggctttaagcctgaaaactggtgatctctccaaatgaaatctggaaatctttagatttagtctggacgactaatagaagtattagattccagtggagtctttttaccctttagagccagactccttgagggacatttttgaaattagtaaactgctgatatcttagagcatatcagatctcacaaatttcagcctgtctatttctagtaaaacaagaaaatctagggtttcctaaagaaatcagaaaaaaaaaaaaaaaaaccctcatggtttaaaagacaaatgggatactatttctaagccttgaatctatttttctttggtaagcagatagtgtgggacctggagttggctcccaaatctcatgtcgatcaatagcacaggggcagggaagtagattctttttcctgtcagcataaaaatgatggattttagagtttgaaagatactgatttattctgggtatagtgaagtgtgatagctgtttgtatgagtgacaggaatctttatagttaacctgttttaaggttataccaaagttagaatttataagatttttttttttgttttcagtgtgcgtggcatgggaaagtgaaaaaagtctgctttttaaacttgtaaatatgttagaaaattgtatattatagcagcagttgtcttatgttgattgtgacatggaaaataatttgtgtcattttagaagaccatattggggcatcagtgtataacatatactatagatcttcaataacttttatctaatgatgctgagtaaaattggctttcttcaaagccaaacccagtcattttcccagaagtgtgttgtgatttttctcctatgaaactatgatggactctaatttagaagttcactttgaaatgaattccaagtgtaattactttgaatataggtatagtttaccttgagactacaaaatgctggcaatatttggtgttaaacccagaaagtttatatttatttgttttaaaagaaagaaaaggaaggaaggaaggaaggagggaagaaggagggaagaaagaaagaagaaaaaaacggcttaaaggaatggcatttagaagtgggagtccttgaatgaaattctttcctgtggttttaaattacatgattatgccttgattacttttaatctactaacttgacaaatcaaagtcatttgggcaaacaattgagaattcaccttcttaaggtgtagagtttaggatagaagttccagacttagtcaatggagtactgtgtttaagggaagatttcagattctatttaccttaagtaataaccaggtgtgttgtttctcttttcattctttgtaagtctgaagtatgagaagcaccattctattctgtggcttcagctctagttgaaataggaattctaaaactgaatacattagtttggaagaattagctttttttcaagcaccttctcttcctacctcctcttgactgtctaggtgctggcagtgtgctgggctgataagtgtgggcctgggaactttagaagggaatgaagaaagaagggtggagggaagcactgtggcctaggcttgattaggaaagaaaacgtttaaagcagaaccctatttagatattatagtattttgttactgttagagaaagcatcttagagttgtttaacaagttggcgttgtttaacatggcatctgctcagtatgttctcagacagtagtgttactgttatttggggtagtaattctagattataatagcattgacttagattgcccacatcaatgtgagttaactgttacatatgtctcaattttggtaaggaggcaactttagtttttatttctttttagtaggtactcatttttaattttttgccctgtttttagatacatccacttttctactattctcacctatataccatccctgacactttctgaattcttatatgcttttctaccagaatattttattttattttattttatttttttggtttttcaagacagggtttctctgtatagccctggctgtcctggaactcactttgtagaccaggctggcctggaactcagaaatccgcctgcctctacctcccgagtgctaggattaaaggcgtgcgccaccatgcctggcccttctaccagaatattaatccatattttatttcatttttgttttgtgccaccctgtcctcccacttttaattaannnnnnnnnnnnnnnnnnnnnnnnnnnnnnnnnnnnnnnnnnnnnnnnnnnnnnnnnnnnnnnnnnnnnnnnnnnnnnnnnnnnnnnnnnnnnnnnnnnnnnnnnnnnnnnnnnnnnnnnnnnnnnnnnnnnnnnnnnnnnnnnnnnnnnnnnnnnnnnnnnnnnnnnnnnnnnnnnnnnnnnnnnnnnnnnnnnnnnnnnnnnnnnnnnnnnnnnnnnnnnnnnnnnnnnnnnnnnnnnnnnnnnnnnnnnnnnnnnnnnnnnnnnnnnnnnnnnnnnnnnnnnnnnnnnnnnnnnnnnnnnnnnnnnnnnnnnnnnnnnnnnnnnnnnnnnnnnnnnnnnnnnnnnnnnnnnnnnnnnnnnnnnnnnnntcctttccctctccctccctccccctccccatatccctggctgccctggatttcattatgtagaataaaggtttggctgatctcaaaccttaaactcacagagaactacttgcctcaacctcctgagtgctgagattaaaagcatggaccaccactttcttgaggcttcctattttttctaagagccaagaactagccaacccttgtggatttctgagttcgaggccagcctggtctacaaagtgagttccaggacagccagggctacacagagaaaccctgtaaacctccccctcaagaaaaaaaaaccgcatgttttttcaaagaccccaaaacatttttaagttgcaagactgaagacacctgagaattatttaatccttattaattctgtatctttcttaaagtggccaactcagccgtcttgaaatagggaaatgagtatccacgtaagctcaggcctgtgttcctagcttcttagaaagccgaggcaagaggatgatcaaatgagttccatgtcaacctcggcaatttagtgagaccttgtcctaaaaataaaaagagggaggcagtggtgctttcagacaagactgcagctaccaaagcccaaagcccagaatttaggacagagcacttgcaccatgaatcaaaccatcagctttgctgtcctgctggcagttttggtggtgtgctgagggggaaaaggtgcctgcttggtgatacagagcctttgtctagtatgtgttcagtctgacactgcactgtggggttgcccaagctcatataacacttctagtccagccacaccaacaagcacatcgtcttctcagccagttttaccaacaaggatagggcacctctacatgcaaaactcacctctagccagtctcctgtggtctttaatcagaatatctctgtgctcagagacagctacattgctcagatacaaggatttaagccttctggctcagaataccacatggtggtagcagctgttccttctttcattctcccagatttcatttctctgctcattcactccctttatcccctcatgctttggagggaaacaccctgttcctcataaggtactactgtactacgacatgccataaacattccactcaccctaccactttgttccctgtacaccattggctgatcttgtaatcttccttccagagttgcttctattaaaaatggcagtcagtacaactcaagagtagagcacacacctacaatgtgcaatgctataggtttgatctctagtactacaaaaacaacccctaaattaaagcttatattaatagttgtatgagaggataggtatttgtgagttgtgaaaaagatcatgcagttagaaacttccacagtggctcataagtcttgttaatgctaaatactgaattgtcttgaatttgttatttttaaactaccacttaaaggaaataaaagtcacttaggaatgcttcgctagtatccattagactaaacctaatgagtcttagaataaatcttataccattgatcaagaagatcattataataggcaaagactatatagaattaaggtaggtactggtactaatgtatttccatatcaaattgttgaataagatgaattatctggtcataatcttctggttaagctctataatcctgacatttatttgtacaaagcctagttttattttgtataatttggctgcttaaggatatatcctcccccaacctcaaagctccaaggttggacagtatttgtgcttccttaaggttgtgatatcaaataattcctaatgaggaaggggttctctagagcataggcaatttggaagttactttttctgttacccaggccttaagagctcagttgatggaagtgaaggaggacaagcctgcagaaacagtcttactctaattgagaaggctcgagaaggtacatgttcaggttagattagtctacctcctgggaaaggagaagattgcaatgaagggatatccttgtgaaaatgagtcatactacagagacttatgtaggcaagaataaagcattctgggctggagagatggctcagcggttaagagcgctgactgctcttccaaaggtcccgagttcaaatcacagcaaccccatggtggctcacaaccatccgtaacaagatctgatgccctcttctggtgtgtctgaagacaactacagtgtacttacatataataaatagatctttaaaaaaaaaaagaataaagcattctaactttaagtattgtccttaaaagataagttagtacaaatagtatttgtcttgctcctgaagtagactaatgcttcagtttaatatactctgcaaactcaggttttgacttttaagggacattgttcagaagcagtctacttagtggtagcccacccctgtagattatgctatgtgggaaagatgcttcagcttcatgggtgggtcagacagaattctaggtatggagttaggtaaggcaaagggattctcaattgttattatgcagaggaggtcatatagtagaatgttttggtcccaagtttctagattagcaaaatccagttctgtattgtcctctattgtagctataatatgataataccatatcaggcttttaacaaggtagaaaatatacccctaatataactaccttgatcaagagccctgaggaggaaaggacacaggtatggattatcccttagaaccatagagtaggttttcttgaggtatctttagatgatcagctgagatgagagacccttccttggggtcgtagtttgtcacagtgatttgggggggggggggtttcctaagggaatttttggcttcttaccaaatttttggcatcagtttgtctacaaccacaggtctccttaatttcttctcttgtcattactcatattctctattttcccagtgtgagcaattttcttgagttctctcaccttttgtcacatggtatctaatcccaactgtgacatcccattgtgccacctaatgcatccctttttccatccaagtagatggcactgttttcaagagggctccttggaccatcaaggccatccagtataatgggagtccccagggccatgacaccgccaggctccacagttgtgctccctaagtacacaaaggcatctttggtggtagcagagctcaagtgcagcagctgtacctgctgctttttattgtggtaaaaaatagttatactgaatattgtgtcatgtcggagcatgagagactggctgtaagaactccatctgtgtctgggcacctagctttcactggcatggaactgctcatagttcatgctcagaatttggctagtgtagcctaccaggctggctcatggcagctggtaactggtacagcagatgcccaggaacagctacaatgttgcaagacaccaacatgaaaggtagtgctgcctccctccccaaccctaccttctgtaaatggaattctgagggcttttctttgccctttttgctcccaattaacagcagggcatttgtatgcccaccattgtagtccgttttagcttctgagtataacacagagaactaataaagttattaaactgtaggcactatgctggccatatagtcatctattctaaccctcaatggctgcctacttcccagccacgtggttctttacctgcaatctgagtcttcttaccctggctcgtgcttttccatgtgtgtcctcttggcaactccctgctgatctgcttgccaccagccagtcgtcctgtccttctccaggtctctcttcttcctcttctctcatctctctccctctctttttgggaacccctgactctgatcagaagccccaccttattcacttctgctcagctataggctgaattagattttattaaccaatctgaggtgatagaaaagagtttttacacatctttgagacaggagatgctccaaataccatgacaatgccaacctccagactgctggcaggtccatcagcatctgaatacactgtacaaaactgtacaaaaccccctcccccaacaaccttcggttttgttgaatttaaaatactcacatgtgactgattgctttcttagacagtacaactttgaatgtagatacaacccaagagatttaggtttatattttgcttgaatagatgtttggggctcttgtaacttctccagaaatctgaagaccagtgtgtatagtgtgttaaaatagaatgaattttccacctatatgtttacattactttattttagataatgtgctaatagaacttaccacttagaagttcagatagatcatggttttacttgaccacctcccacccccagtgccaaacaacagaaaatttaaagtcctttagatagaataagttcttattttatctcagtgtccctaagaagtagttaatgtctatatttggcaaagtaggttggcttaaatttacacaatttcatggatcagtattctttaaaatgattaactgtttgcttataacttcatttgaaagtctaaatttcgcttgggcgtggtggcgcacgcctttaatcccagcactcaggaggcagaggcaggcggatttctgagttcgaggccagcctggtctacagagtgagttccaggacagccagggctgcacagagaaaccctgtctcggaaaaaaaaaaaagaaagaaaagaaaaaaaggaagtcttaagtttctagcatgttacctatatcaagtttgcagttacattaagttgcagttaataatgtaaacactacatatacataaattatagagaatctggtacatttacttttacgtaagagcagattagaactattctttcctgtatggccgtcagggttgttttctcacgtgcatgcctatgttgagtatgtgctacagcttataaataattgcgttcacaattagctaagacatattaatctactgagacaaaatgatatagccttggctgctgagaccactgacaatagatatttaagatcttaacaacttgagtaaattatgtagagaccagaaatagaaccagtttcctctcagtttagctttgaatattatcaggtttttggataatagagtaggaaatgcttagaggtgaaatgaatagcagaaatgtaatcaattactattactctagcaatgtctaaaaggctctgtaatttcacctgtcactattttccactttagaaatttaggctcagatgttaattagctcacagttgtgtaatttttaactaaactctaaagcaaggagtttaatccactgtttgattgatgccacagattgagttaaatgtgaaacagaatgaggtgaaggggtgcctgagtgacacccccaggacatcatgggagtagttaaatatccatcagactgtggttctgtttgtgatggatcttaagtcgattgataatggctttttaatgttttatcagcatttatgtctgtgtgtccctgaactggtgttacagacaggtgtgagctgccgtgtgggtgctagaaattgaactggggtgggtgtgggttggggagtggtggtggctgtggttccctgaaagagcagccagcactctgctgagtcatctcttcagcttcagccctatctctccttttttttttttttttttttggtttttttttttttttttgagacagggtttctctgtgtagctctggctgtcccggaactcactttgtagaccaggctggcctcgaactcagaaatccgactgcctctgcctcccaagtgctgggattaaaggcgtgcgccaccacgccccggggctcttcctttttttaaagacaggttcttgctatgtagctctgtcgtggaactcactccaggcgaaataatagcattgcctgcctttgcggtttttaaaggcttgtaccaccactcctggattatttgtttattttatagtactgaggattgaatctccagggctttacccacatttgctatacaagtactcggctcctgacccacatccccagcccaggatttgcttcagagtgaattcttttttttttttttggcttttcgagacagggtttttctttatagccctggttgtcctggaactcactctgtagaccaggctggcctggaactcagagatcctcctgactctgcctcccgagtgctgggattaaaggtgtgcgccaccacacccggctcagagtgaattcttttttcctctcctttgcaatttcagaattcttaagaagagattttagtcaggaactccttgtgtcttctgacttagaaagatttattaattatgttctagaattttgaattctcaatgagaactattgtaaaataactgcttttgtatagatttacttaaattagccactgttaagatggacctaacactgagagtaaactaacacttttattaaagtatgaattgagacagttggaaagagggagtggaattttttcactgttcttaacttccaatgacaataagctttcaggcttgttagttcctgggggggagattcatggagagtcctagtacatgggcacacttggatgttgggctttatcaccagaggccagtttgttatctgtcctaaacaaaaacagaattttaaagcattagaaagtacaagtgcataatattaagtatgttgattttgtataaactccagctttggggatgtggttctaagaccaagatgcagggtttcagtaagctttataataatgtcttcttttttcttttgtctttctttcttccttttttttttttggtttctttttcgagacagggcttctctgtgtagccatggctgtcctggaactcactctgtagaccaggctggcctcgaactcagaaatccacctgcctctgcctcccgagtgctgggattaaagtcgtgcgccaccacactcggctatgttttcttttaaaaaattaagttaattagtccattctgatagatggtttattgttatgttattttgtggttctggaaagcaaacctaagtccttgtacatgggaggcaaatcctgtagcactgagctacattctaagccagtggtccgcagcctttctaatgccctgatcctttactcaggatgtggtgaccccgatcaaaacattattttcattgctactttataattgtaattttgctttttcaaatttataatttattgtaaaatatctgatatgtaacccttataaaaggattgttcaatctccgaaggagtcatgacccacagattgagaaccactgctaaagctcttgtttttatgattttatgatgaatttttttggagaaaagttcttgctatgtagccccagctagcctggaatacattatgtagatgagtgaagctggcctccaactcaccgagatctccttaaaggaggattaaaggcatgtgccaccaagcacagtgtattgtctttttttgagacaaggcattgttaaatattataggctggcctccagtgcccagtcagtctacttgcctctgcctccttagattacatttaagggctatcacaagtagttccagtgttcattttgtgaactggttgtatatttgtatgtctgagaggaatagagattttctatgacaaaagttgtactgtgtgtgtaccttcttggggaagacagctttggatagtatatataactccttcctcctacactgtttacacctgtaaatactatatttgaaggaggaaagtcatactgtcatatagctgttataataaaatctcaaagtctatcaagaaaagttggtgtaaagagtctggcttcaaacatggctcagagctccctttgtaccagaaagttctttctgcctttgtttttatggaaggaaggaaaggactctttcttatagcttgatttggttactttaaaatcttggagattgtgaaacagttctataattgttaatgtttgttaattctttagtgtatcttctccacgagatggaattgtctcctaggcaaatgcagtaccattgagcctgggtcactcccccagcccgtttcctcttagaaagtgtaagtgtgtttggattgtcttttgattgcatttaaagaaaaatagacttgtctattttgttaggtggccacctactaaataatgcaaacatgaataatgcaaacagcagaaaaaagagacccccccacctcaaggtagaagagaaccaactcctgaaagatattctctcatttctaaagactttcaagcttgtaggggtgattctcctatctatgccaccagtgttgagattataggtgcctgccacctcatctggcattttatatgggttctctagttgtggactagcattatgacatgctgagccatctccctggaccagcctggaaattcctcagacttctaagtacaggattgttagagaaggccaaaaaaagtacaggattgttagagaaggccaaaattgtattagtttgtctttgtcagaatctctaagtataggggaataaaaccccaaacatcttttatccaatgttgccttatcaggcaaggtacctagggcatggttcctgctttgagtgtgtatatgtatgtatgtatatatgtgtgtgtgtgtgtgtgtgtgtgtgtgtgtgtgtatatatatatatatatatatatatatatatatatccaaagcttttaccttgtatgcaatgactaagtttaattcagttctatataaattaataatgaagataattaaataatgattgcatttcctaggcagttgtcagtatgtttgtaatttgttagaaattagccaggaattctgttgaaactattctgttgattagcttaccaaaacaaaacaaaacaaaaacaaaaaacccagtttttctgaatcccagcttttgtttcctctaacaaagaggaacatttttactaaggacacagatatcaagtttataatgagcagagatgtaaagctcctgagacctttcccatgctgccttttgagtggtgctgctgagacagggtttccctttagctgtagagcaaatctgttttatctgtgtgtggtagagtttaattatgattgttcatattctgtctcattcttttgaaggagtaggttctttagcttctgagcagttaaaggggctacaggtattctctgtctcattcatcttttttttttttttttggcttttccagacagggtttctctgtagccctggcccctggctgtcctggaactcttttgtagaccaggctgggccttgaactcagaaatctgcctgcctctgcctcccgagtgctgggattaaaggcgtgcgtcaccacgcctggtttaaactttttttaaaaaatatgttcccgataagaaatcaacttcatttnnnnnnnnnnnnnnnnnnnncactgccaaaagtacattttacttaattttgatcagtcatgagtggatgaaattttcagcaatgataatagtggctagctgctgttgctcattgtccctcctctcctgctccttgctctctgacccccgactacccttccctcccacaccctccagctctcccacctccagccccccaaaacaagaacagggtttctctgtagctctggcaacactggagctccctctgtagatcggtctggcctagaagtaagagatcttcctgcctctgattcctgagctctgagattaaaggtatgcttcaccactgcacaggttgttgcttatttctggctgtagttaggccatctgccagagtgcttgattcttaatttcctcagctcctagtaaaagtagcccaaactgcttttttcaccttagctcaatctctaaaacccacttcataaaagaatagaagtaatttacaagcacaagtaaatgtaggaaaatagcagtagcaagacatttatagcattattaatacaattattctttgaaggatggtaatatagaaattcggttataattcttcagaatagtcttaatttcctcattgtttttcttaatccttttttgtgtacttagtgttagtctgccttttgattggttccctttatctgtcacttgtttttcctcttagtaaacttgctgtccattcttcctttttctaactctagagtctagaggtagataccttgaaggtatgttatgtcttcagggtaaattcctaggcactgctgggtcagaggagggattgagctagttatttcattagacattgtggaattctcctgcctcaagaattatattttccaactaggtatatcttatttaaaaaaatataaagcaaaatgcatatttagtaaggaatagctattacctttggtgaaatgtgtatatttccttttcattaaaatggccacatgttaagagtctgcatgttgctggctcttgttttaatgtccatttgtcttgagtgtcttgtgtaatggctatttaagtccatatattcatttacatgattggattataaaggacagagcccttgtctgatcagtctttagtaaggtgctttgaacttgagaaatataatgtttgtaaattaaatagcccttatagtataatcctgcagctgctaatacaaggatgacttttgttgtgtgcattaaccattgaatcctgtgtaatgctaactagaaattgctcctacagtgagaaaaagatggaggatcttcatcatttggtagtttgttttctgctttatttttaaatgtgtgtatatctgtgcccttggaatccagagatgaaattataggtacttgtgagttcacccaacattaagtgctaggaactgaactcaggacctggaaatttatttacttaaaagcccttttaattttaaggaggaatactttggataataataacaaaaagatgttgatttttctagtgttttctatttattcatttacttatgcgtttttctggaataattttatttaaatgacaccaaaaaatttgttgcacatttctgtcttcaaagactttagctagcattcttcctgtggtttcatctagagttttcttttttcttttttatctttcatattttatttgcattgatgttttgcctgcatgtatgtatgtctatgtgagagtgacagatcttggagttacatttatagctgctatgtgggtggtgggatttgaaactgggtccttcgggaagagtcagtatatttaactactactgagccatctctccacccaccatccagagttttcaaatgttaagaattgaaacaattattgttttgtatgtgagattgtgtatgggttcaagcagaatgtcttaagaggcataggatatttagtgaataagattttatggttagccaggtgtggtggcccacgcctttaaacccagtcagtgcttgggaggcagaggcaggtggatttctgagttccgaggccagcctggtctacatagtgagttccaggacagccaagactgttacacagaaatacctgttagtgagtttctttaaaaacccagttgtgttatgtggatttttatggtgctatagtacacagtggttggcatgtttcatttcttagctatcaagttttttacagttctttttgcatttgatagatacttcgagtgtcacaaatgtttttacaaatattttaacaatatctactttttgacaaattccaggaggtatacttaatctttaaagccactaatgtattctctataaacaagtattttcagcatgcatgatagagttctgtgtgcttttactgggttttaccttttacttactgcctcttcctttgtactgtctaggtcaggggtcccactactgccttatatactttagacaaataaagtctttgctttctgttttactagggcctctggttcttccagctactaggacctcaagaatatcccttaccttccctcctcctctatactctttttcacaataagttcttagaactgggttcaacttctattttcttgaaaaatttcccattgttcttaatcttaatcttttgctattactgtcttctggtttctggttttttttttgtctttgtttttgtttttgttttttgttttttgtttttcctttaagtatgatttttggtcttttacaaattgaagtagctgtcatcctagagtagaacattctgacccagggttaactattaaaatttatcttttggcacctactgtggtggcaaaggtctgttttcccagtgtacttaggaggtgggggcagggggatcttgagttctatagacagcttagcaagcccttgtttcaaaaacccaagggctgggaatattcaaaaggaaccagtttccagtgtagaacaggactttggatttgaccccctagccccaattccaaacaaaattgtttttttttttcctcaatagattctctcttgaattacacttattttcttcttttacataataaggaaaaataaagaatggaaaggaaaatgcttagagctcatgttcattatctaaatgtaaaaagttccaaggatacacatgtgtaactgcagtttgatttcctgtgtacccatcataactttaatagctagcaatcttttgctagtgttttatatatctttataattcttgattctaactctaatttactcagaaatattttttaagtacttttaaagatttcttttttcttttgagacatgggttctctgtgtagtcctggctgtccttgaactcaatctgtagacccaggcgggcctcaaactctacctgcttctgccctaagtgctgggcctaaaggtgtgatccaccactgttggtaaaggtttttttttttttttttttttttttttttttggttttggttttggtttttcgagatagggtttctctgtgtggccctggctgtcctggaattcactttgtagaccaggctggcctcaaaactcaaaaatctgcctgcctctgcctccccagtgctgggattaaaggcgtgtgccaccacacccagcaggggtaaaggttttaatctatcagtttacctactagtagtatacagggcatctatacagttaagttagtagattattaagttttttaaatgttaaatgattgtttaacaactttctttgtggcaatgctacttgtatagtgatttaaatctattgtatcatttttcctcagatatccaagcctgccatgtagaacttaactgtattgatttatagagctcaacagacattcatatctcttattacacttacattgatttgtatgtagaggttggtgggcagacagggttatggaacacatgttctggtcagaagacaatccatggaagtcatttttctgctgtgtagattcctggggattgcacataattgtcatgtttggcatcagggacttttccagcctgagctggaaaagccatagagatttcaattaagaactttgtcttctttgttttctgctttgttttgtttttaatttaaaatctctcacagcatctgtagcacagtttgaggatatactagatatgtaatgactttgagttcatattattggcctagatgttttgtccatggaattatttaccagcaaccctaattttctctgagatagttaatttttacatttttagatagcatttgttttcaaaggcttgggacccggttttaaattccattttgaaaatttatgcatttcaggaagataataatgtgaaatctaataggaactactctgaatttgtattttaaagtttagtgctttttagtgacttttgcatgtttgtatttgacaaaaataaatttgtttgtttatttagacagggtctctctgtaaccctggttgtcctggaactctctgtgtagaccaggctggccttgaactcaatctgtctgcctttgtctcctgagtgctgggattaaaggcgtgtactaccaggtctggcttcaaattttaaagtttgctaatctctaactttattataaaagtcgttcattatggaaaataagatgaagcacacttaagaactcaagttcacaaatttctaaattttaaaattactacattctttttaaaatgtatgtcttccagtcttttttgtatgtggtcatggatttattgaattacatacagtggtgctcattttctctccttttcagataatttccttgtcatgcctttgaaccaaagcagtagatcttaacgttcaatattctgaagcccatttactgatttctaactataaacaaaacaacacatgctttatttcaggttgtagtcctggtgcatgcatgcattgtcatttttatgccatgaggtaaaagtcaccagttttatcctgattgactcagcatgttaagactttagactggagacttagaagtcagagggtcctgtacactgcatgggagatttgagttcagtcttctaacactatatgctttacttactattctcatctctgtgggatggaaagttcttagaaccagggccttgatcttgcaagtattagtgtttctctttccttgggatctgtctagaatagacatgcagttatgccaaatagcacttcagttgcttcagatcagcaatacttaatttatatataatcttattgctgtgaaacatgctacttcaaatttagttgatataggttggttataagtgtcaaatacattacattcgttagtctggttgaatgtaagaaagaattcatttaaaaaaaaaagtttttcgggctggcgagatggctcagtggttaagagcgccgattgctcttccgaaggtcccgagttcaaatcccagcaaccatatggtggctcacaaccatctgtaacgaaatctgatgccctcttctggagtatctgaggacagctacagtgtacttacatataataaataaataaatctttaaaaaaaaataattaaaaaaaaaaaaagtttttcataaaaatcgcatgtcacctagagtaacagtcatctgaaggctaaattgggctgtggcatattcacttccaagataatttcttcacgtggctattagaaggaagtatcagttcctcaccacatgtttcttgagtgctgctagtttggtagctgatttctcactagaacaaggagagcaaatgggaagttgcagtgcctttgtgagctaatgttgggtgctgtactgccatttacttgtgcaagtgcaagagacggacggtgcatgtgcatttgcaggtcaacatcagatgtctatcaggcttgctctgccttatttttaaaagatgtatcttattacttgtccatgtgtatgtatgagtatagatggccctggaggccaggagagggtgttagatctcaaggggctagaattacaggaggttgtgagttgcccctaacatggatgctatgaactgacccctctgttatctatctcagcaagtactcttaactactgaaacttttctccagcctcttttcacctttttttttttttttttttttttttttagataaaatatttattgaactggcgcttccagagatctgtctctgtttccccagaactgtgatatagataggtacacagcaataagccaaaatcagagatacatatagcactgtttccctcctgtattcttaaaaaggcaccacagtaaatgagaatagaaagggaatcagtgggagtggggataagtgtgagtaatggaggggatattatcaaagtactttatatgtttaaatattttcataaggcttaggatgtagctttgtggaactgggtgggggtgagaatgggggcgagcaactgatgttttggtaagcaaaactcaaatcaagagaaaattgattaaataaaattttactaaattttaaaagaggctctttgaaaaacacctttaggatttatttatttatgaatgaatgactggtcatagtgactacagggataacttagcagttaggagcactggctgttcttccagagaatggggtgttgatttccaacacccacatggaggctcacgaccatatacagctccagttctagagaatctaatgtcctcttctggcttcccaggcattgcatacacatggtacacagacatccatataagcaaaatacccatatatataaatctctctctgtttttttaaaagcctgttcacttttatactttctaacacttgagtctttgaggttggaagatatgtatccaaaatagcaagccatagtatcataatatatgtggccaaaaatagcaatccagaagtatataaagaacttacagaggcaggtggatctctgtgagtccaaggatagcctggtctagacagagaaaccctgtcctgaaaaaccagggggtagggggaagaacatatacagctcagtaatacaatgtacagtcaaacaagcaaatactgtagtgaacttgcaatagttatttaaaggatgtgaatagtcaataagcacaaatagttttcattaaatatttaatcactagaagaaaattaggaattaaattcataatgagggtgctggctggttaagagcacttgctcttgtagaggacctaggtttggctctaacattttcagttccagagaatccaatactcttatggcctccacagggacccagcacacagggcatttacatacatgcaggcaaaacattcatgggtaaaatttttaaaaataattaaaaaaacacagcaggctaattatatatatatatatattatgtatatataaataaataaaacatccccaaccaaagcaaattttgcaaaagaaagcatttaactggggacttgcttacagtttcatcagaggtttagtccgttatcatgtttaggagcatggcagcaggaggtaggcatggagctagagagtagctgagagctatattccgattctggcctactgtccaagaggctcctgggcctgcttttggcttttgaaacctcaaagcccactcctagtgataaactttcactaataaagatacaagtttcaaacagtgccactacgatactatgggggtgggggtggggtcattcttactcaaatcaccataatataccttttagaagagcaaaaattaagacagtaaaggctgttagccaggcattgtaatgtactcaggaagcagaggtaggtggggctctcagattgaggccagcctgatgtacatagagaattacatgctcaccagagctgcatagcaagagtttgccttaaagaaaaacaaacaaacaaagccaacactggtaattctagatgttgctaatgatttgtagtagcttggaactcttaataatattcatggaaatatatgagagtatgccacttaggaatatatagttgagcagtttccaataaagttaaaagtgaattttttatatgatctagcagttttacttcatttagaagcaaaggttcatcaacatgtgagttgtaaattacagtacttccatgtaatggttttcactcagcaggaaatgaagccatggaggcagcttagtgggacagtgcttgcttattatttataagttactggatttgaggcaaggcaatgggatgtctttgtgaagtctccttaccagtaggatgtgcttttatggtcactttgccctttgactgacttctgtttctaaagttgtttgttaaggcaggtaggcaaatgatgccttatgattccttgtgattgacttgtctcttatgattgcagattctcacaaacacaaagataaacacaaagatcgagaacaccggcataaggagcacaagaaggataaggataaggaccgggaaaagtctaagcatagcaacaggtaagaattgaccaacagcggggagggtatagggaactttcgggatagcatttgaaatgtaaataaagaaaatatctaataaagataaataaataattaaaaaagaattgatcaatagggagttagcatccttggtgtccatggataggtatcagcttgaggtgagtagcaaagtaagagactatatctgttgtagttactgaagagactcctttaagaattaatgcctcacttggtaagtttagatctagatgtacagagaagcacagtgagtcttctttcaatatgcatttctttctttttttttttttttggtttttcgagacagggtttctctgtgtagtcctggctgtcctgaaactcactctgtagaccaggctggcctcgaactcagaaatccgcctgcctctgcctcccgagtgctaggattaaaggcgtgtgccaccacgcccagcaatgccattgtttcttaaagctatatttatatttaaaatttatattttaaaactgctttattggtttgtcttattgtcagcagacaagttaaagagaaaattcctatccttttttaataattgtgttttgttttaccattttttgagacttgttttctttttatatccttggctgtcctggagctagctctgtagatttgagtgctaggattaaaggtgtgtgccaccaccacccagccagtaataaattttttgagtcattaaaaaactagtttaattttctcttaggatatttcttctcaaattatgtgctcctcctgttttttcccatcacatagtcatttcttacaacttagtttatgttttattcttaatattgttttttcccatctcgtagtcatttcttacaacttagtttatgttttattcttaatattaatctcagcacttgagtcaagttttgctttttatgcacccttcttctcaatctacatttgtctatctaacactaccaaaagagacttgagagcaaagaacactgccaacaataaagaaacccatttcatgataatacaaaggacattaaaaatgtttctatagtatcatcagagcctcaaaatatgcacacacagaaactattagaattttgaagagaattcatgattgtagttaatgattttattcttttgttttcaataattgttattcgtgcatgtaagaaatttccaaggctaagggagggttaaataacagaaaacagtatctgagcatggttgactaacacctgtatgtaaccttagcattctgagcctgagcacggtggataaccagaagattgaggccagatctaggctacatggtgcaagacactaacttacagaaacaaacaaacaaacaaacaaacaaaaaagtgtagtgttgcacaacttgacttaattgacatttacagaatagtgacaccaaaatcttaggactgtgttcaagtaggtgctgagataactcgtgcttttagctagtctctcttaaaatcatcccttttacttctccatgcttttgtgtgtgtgtgtgtggtgtgtgtgtgtgtgtgtgcgcgcgcgcgcgcgcgcgtgcatgcatgttttcatttccttctaatgtgcatagtgcttatctaggaggctttggttgccttcctctgctgaatttcccttgtcatttgcctttacctcacactgttaattgagcattgtaaacttcttttaaatttcttagatacgacatgtttctgataaaccactaggccttaaaatatgctatggctattgtagagtactcttactcttcactccttattccccttctcctattagagattgaacgtagggccttaaatgctagtcaacaataccacaatatccctgacccttttttagattgatagagattgggtcccaccaccttgcccaggcttgttggttcttgttccataggcccaggcaggcctggaaactacttcatcttcccaagcactactgtacctggactttcttgttgctttcttaatattcttttagtaataactttctaactatgtcatattactaatttctgtggtctcctgaatatattatttccatagtaattaccaggtttggctgttaggaataatactgctatgaacattgatatttgaacacacatttgaagttctgttctcaattccttcaggtgtgtacatctaagagtggaggtattggaccatgtcagtcgttgctttctttttccttttgaggtactggggattggactgaggtgattgaacatggccaacattctacagctgagctacatctgtaacccttaacccgttttaccctgcttgttatgatggcctagcttatgtataatgcaatagaaaaacaaagaggtttcgatttgttgggttttttttaacttattttttcctctttaccatgaagaagctttatcatcagtagtgatcagagacatgtttttacaggtctgatcaagacatgctgattttaatgttattaggaatttattttgaaaatatttaaaagaaagattaatatttaaaacaagcttttccaaaatgatttcatgttctcttacatatttcaccaaccacaatttatgattataatgagcgagagggacagcataaagcaaaagtgtatctaaggacctagggactagtttcttgtactgttttactgaaatcttttcttaaaactggtattttattgtcagaactattacaataattcaatagcctctgtcttgggcgtcctggcctgtccactaatgtgttctatgactttcactaggtcacccaaaaccctttttctccagtgcttcacaggagggcccaggagtcaataaatgtaaagatcttatgaagtgctctacaaatgtgaaaatatattttgtccatttttcataattacagttttgagtgagtaagcacacacagatttaggcagctttttgttatgctttgctttttgacagtgtctaaaaatgtcttaaatgccagcttatgttacttcctttttctttggattccaagtctctcaaacttgtcacgaaaagcactaatcacattaaattctaactttaggaaaacttcatccccgactgtctactatttggcatctgacgttgcatggtttacactaatcaaatgaaataattacttatatatttttaattagatttatcttatgggtattttttatgtatgtgtaccttcatgtatgtatgtgtaccacatgtatgcctggtaccctcaaagatcagaagaggacatcaagtaccctggaattggagtcatgtggatggttttgaaccactatgtggatgctaggaactgaacccaggccctctgcaagagcagcaagtactcagctttgccatctccatagtcctcattttttgataatgtagctatagttatatgttggtgacttacatgaatttggcataagttttagtcatttggaaagagggaacctcaattgggaaactgaaaaactgcttccctaagatcggcctataggccattcgtggtggtacacacctttaatcccagtacttgggaggcagaggcaggtggatttctgagttcgaggccagcctggtctacaaagtgagttccaggacagccagagctacacagaaaaaccctgtctcaaccccccccccccccaaaaaaaagatcggcctataggcaagaggtgggggggggggttgttctagattaatggttgatgttagaaggctcaatctactgtggctgaggtggtagttgtataagaaggctggctgggcgacccatgcagagtaagccagtaagcagcattcctttatggcttcatggcttctgccttcagtgcgatgtgacccgggacatgtaagccaaataaaccattttctccccaagttccttttgatcagtgttttatcagaacaatagaaagtagtaatattttacagatcagatatttaaaaatacactttgaaataaaaggactgtttttctaggtctcaaggcattactgggcttgtagtgtgaccaggtagctctcttaatcattcttaatcagattttctttaatttgtaatattgaaaagcactataaaacaaaaggtcaagttctgccactcacaaactgtatcctaatctaagcatcttaccttttttgcctccttttcatttttgattgatttcctgctaagtaatttagataatgatggtgatgatgacaattataacaaaacctaataaaagatcatgtagataaattgcaactgtcagtttttgtagtggaatctaactcagtagttaattattgataaatctgatttggaactaggactttttagttatttctagctttatagttgagtactatcattgcttttaagatttcatggtggaggcaacctttttgtttgtttttgcagatgttggttatcaaacttgttgattctggctctttttttttaaaaaaaaaatctttttattcatttaatgtatatgagtacactgttgcaatcttcagacacaccagaagagagcatcagatactattacagatggttgtgagccatcatgtgattgctgggatttgaactcaggacctctgaaagagcagtcagtgctcttaactactgagccatctctccagcccccaacctttttgtttttttaagaccgggtttctctgtgtagctctggctgttctaaaactagttctataggccaggctgaccagcaactcagataccctcctgtttctgcctctcaagtgctgggattgaagacatatatcaccacacccagctcatggagacaacatatgaagctagccactgaaaatagttacgatcacagaaggatgaaaggataatggctaaaaaaagaggtatctggtgggtacagtggtacttgacttgggaggttatggcagaagggtgaccaagttccaagccaaactgagctataactgtctcaaatataattaaaggagcctttcagatgataagaaaagcatgaagaggttaaggaatgtagctccgtgttagtgtgtaccccgtagaatatacaagccctatgttttattcccaatatcacaagaaacaaaacatacacaagacatgttactgttgtagcatgcattttgtttcagaatggatccaattaagtggatactttagttacaaagtgtaggacagaaatgaggtctaaaatgttgtcttgagataaactactgctgaaaactgttttaattcaagaaattgctttaatttaaagaagagctttagtttttaaagggaggaagaagctactggaaacagttcagaaaggggaatttataatacagaaatggttcttgttttggacaattgggcagctttttataataagataggtagccacaaaaggctgagctgtaaaccagaatataacgtataaattagaacttcgagaaggaatagaggtttagaaagtgcactggtttgggcatctttggaaacatcctttttttttttttttttggaaacatccttttatcttttccagtccgcaaacgaaggaataagttattctatttgacttttctgtaattgcacacaattttccttcctgggcacaagatgcaatgattttttttcagacagcaagttcaaactaacctaatagaaaattcctcgtgataaacactaaatgagttttgtttgtttatttgtcttgaaatagttacccaggctggatttaattaagatcttatggattatacttatgaatgtaagtttaaaatgttatgactttctgagcacccttaggaaatacaaccctgggacttaattcatctctctgacttctatattcaaaatacatacattcttatccgtttgtcaatcataattgaaagttgtgttcaatttacctttatttaatgccttcagagtgagagtgtggtgattcagcaattgggatataccaaaaagcgggcagtaaggtgtttcttgtaagtggaaagcaaaagttctcaaagaagagcgtgaatggttgtgttgaactccagaaaatgatggctgtgtattaattccttatacccaatttataggccaaaatttatagtagatatgtttgtataaggaaatcaacccccacccggacctccaccccaaccctgcccttgtatatagagttgggtactatctggtgtcaggaattcactacatccaaggtgggcaagtgtccttgtgattttgcttagtagcctaatgatgatggacattcagcagccgctatgctttagagccttttgaaaactagctgctgtactattgtctgggagacaacttaaagttacccggaattcttttatttaaagcatttaagctttattttgatgcctgctttccttgtaaacacattaatttctttccttctgtattgttaaagcctactcattctcttataggagtgcctgagatgccattgtctgtcaccctgtctgctgctttgcatagttggcaaatattagtggctaagttctcttctcagaagatgagcagattctacctaatagtgtttggtttttgtttgctttgtttgggaagaatagaatagaatagaagtaatagaatggttaatttcatgactggagacaaactgcctgagttgaactcctcattttccctggacaagttacttaagcattctgtgcttttaatttccagatgtgcaaagtttagataccagtattcatttcagggttttgttgtagcaagatgtgtataatattaggtggtaatatcgttgctatttgctaaatactttaattgaccataaagtaaactttaaattttgatggcttcccatagccaacatctagccttcctgagtatcagactctgagttttgcaggagtactactactctctatattttttttctaaagattaattacttttctagtgcaaaagaggaatgctttattttcccattttactgccatccctcacttgtcctttctcatgccttccttctgcttaaggtctttaaagaaaccctgccatttttttctttagtttgtttagcttctatgagaatcatagaccagaagtttcataattgtcacctaagaaatagcatggctattttctcccaccatctttatcattagtttcttctcctcctcctcttcctctaactcttcctcctcttcctcttcttcctcccccctcccttcttcatgatcatcatcattaaaattcagttgtttgaagtataagtcaagcatgcacattatgaaaaaaaggttttaagaatttttattatccttcttttaaaaattattcttagagattttgaagacatcattatctatcacctctttgtctttctttctgcgctctcttctgaagtgaccctgagattttaaaggaggggggtgcgtgtgttgcgtgtattccatttagggctatggatattgtctatttactttcttaaacatgacttgcttattcaaccggtgtggtacagtcttacagagaaacatgagtattgaatcaaggagtcaacctctgttcatagccattcattaggatttttttttctttcagagtgcctcatatctgtggtgttaattttatatttcatccaaaagtgtaaccattacagaatatccatgtaggtcctgagcactatgtttttcaagttccttcctatgcttgttcctaagcatttcttttatgtatttaatttctagaagtcttttcattggtaaagttggccactctctagcctctgttgtagcctttggttgttaaaactagctttgtgactttgacatactgtctattgctgaaaaagtggcaagatctcctgcccaggtggtgcatgcctttaatcccagccagcacaaaggaggcagaagtaggtggatgcctgactttgatatcagcctggtttacatagtgagtttcaggacagcagagttatggggagaaaccctgtcttaatacccaactgtaaattatctgagtttaactagttcaaaatacaaacctagtttatgatattccaaacagatgggtataaaggagacttagtctgtttaaaaaataaggttgacatttcatccgttttactgttattggtacacaagaggattaatactccaggaggatctttgagttttctacatagattctcattaggctccctcttcagaggaagtaacaatttgtgtgttttgttttattaccctagagtagtcttgatataccattactacttactgattcttttagtttggtgttctaatgaataacaaaactgaaatctagagactcaggtttgcatcctctgattgccaaaaggtcatttttccactaaggcagattagttttctaataattttcattaagaaagagaattgagaagagtagtgtaataactaaaggaagacagagcctgaagcactctaattagccatttatattttcataagaagtaatcacaaaggtttgatcttttcaagtatttagaaaatacctacttggtggcaagatatgtcaaatcttagacttaagtacaacaccatttatatctgaggttgaagaggtggttcagcagtttagagtacttactacttttcaagagtaccccattacagtcacttgcacccacatgccagctcacagcttactctagtcccaggggatctgacaccctctgtcttcctcaaataccaggtgtgcatgtggtacagacatacatgcaggcaaaacacccacatacaataaacaaatatttttaaaaacgatttaagtggaaatgtaataacaatgtacaggttttctaaacttctaaatggaaatactaagtttaatcctagcattgtcctctataacagaatttgcattagttttttgtcttgtttttttgagacagggtttctctgtatagccgtggctgtactggaactcactctgtagaccaggctggccttgaacttagaaatctgcctctgcctctgcctctgcctcctctgcctcctctgcctcatgctgggattaaaggcgtatgccaccactgcctccttccttccttccttccttccttacttccttccttccttccttcctttctttctttctgatttatttattaattttatttatgtgatgagtacactgtaactgtcttcagacacaccgaagagagcagcatcagatctcattacagatggttgtgagccaccatgtggttgctgggaattgagctcaggacctctggaagagcagtcagtgtgcatcagttttttaagtgaccatttcttctgtatatacatttgtctaaaagaaaataaaacctcttagaattattacagaattgagtaaaataagggttgtaagaccaagtacagccagtcaggtgtggcttacacctttaatctcccaacaggggccagcaggtccctgtgagtttaagaacagcctggtctacatagtgagttataggctagccaggctgcatattaagacccaatctcaaagacaagccaaaaacccaaagcacacacaccatgcacacatgctacacacactagtctgtacataatactttctcaacatcaaaaaacaagtgcaatgctgtaaggatgttgtaaggagaagatgtgttcatcatcaaaatgcctgcgattgtttctggagtttatttttatgtaaaatttgtgtaggagactaagggtttttgttgttgttgttgttgttataggtttctataactattactatagtacctttataatagaagctaaacatggtaatatcaaaaccatgcatattatcatgtgtatgatatatagtgagtctagttttagtctttgcactatataaaggatttttttatactgatagaaacacatcatgaaaacacaatgagtggaatgatgtactgttggtaaaatgtggtctctgtgtgtgccattagcattctgtgtgccattcagccttaatgagtggaaggtttgctgtggaaacttgccctttaatgtatagctcatataagtaacagctaacgagtgctggaggagaatggaaatgagggagtatgtaaacaatgcaaagtgggccctccttccctcccatctgtgatagtgctggaatcctcctaaacctgtagtcctgtatctgctagtctttaccttctggttaattttctaagaatttgtttttttgaggcagggtttctctgtgtggcccttggctgtcctagaactaactctgtagacccggctggcctcgaactcacatttgcctgcctctgcccaccaagtgttgggatcaaaggtgtgcactaccactgctcagcttcagtttgtgtttataacccagatgcctgtcttagttatggctacttttgtgcatagaagtgagtgtaacagtaggcgatttgatatgtattctgttgcttggcttaattaaatgccattgctttttgtcttgtttttaatcttctttatagacaaacaccttttttaggaaagtgtttaaaggaaaattcttgggtctcttgagatcattgccagtgaggccagctttttctgctctgagtcaaacaagtggcaaatgagctgtgacaaatcttatagtcctgactgtttctattgtttgggcttacagttagcaattctgcacctgtgatgaacccctaattcagaccacttgagcttgagttctgttttgcttagctgtggaataatccagcagggagcaggtgccttaacaccaaagaaaatgactatccacattgttctgcaacatgtggtttttgctgctagtctcttgtctttatctacatttacagtcaaaggtattttgtatagtcttgttgggatctgtcagtagtattctggatgtgtacttaaaataacaaatattccttaatagttatcttatttcatataacacagtttcctctctggttaatcatttagattgcatccattttctcattttctttttccctttggatactatagtaagtaccaaaataaacatcttccctaagagacatttctagaagatcttatatgaacatgtatgatcattttaatgactcttgccttgtgatgtaatatcttgctttccaaaatagaaaaatgtacttttacggggctactaatatgacacatacctctttcaaataagacttagaaatatgatgaacatagaccttgtccttgctttcaggtgggtcttattgtgaggaagaggcctgcaggatctacaaacttcatctgtttcttcgtagttagtgagaaagcttttagtgtgttgggccattcagtttacaatgttttgtcctgagtctggcacagtcaacaaatacttttttgggtaatttggattgagtcctcttacagcagttgtgactgttggagatagacctttcaactgtatattttattgttagaaagttacagaaataagactaaacctactgtatattctactaccttttaaaatgcttgcagagcttacattatgtagtgctttagagtttatccacctgcttcagtaagacctaatctgaaagcttaacttgtcttttttttttttttaaatctttcttttgatatgcagggcaaaatcctggctatactttctctaacactgagcttctcacttgttctctgagacaacttccccagtgcccccttctgccatgtagttgcttgtttgccaagtagctatttgcagacctccattgctgaacatgccagcctaattcagcagcatagattttttttttcttggtcttcctcttttctctttcttttcctctgggaggtactgagatttccacctgtgtgccctgaacttccttctgaatctcttaagtttttttgttaatgagagtgggaactccgaatttccatgtaataattagtcaactatgaaggcatcctaaagaagctcttgttaggataggaaacaggtgaccatgttcaggattctagcaactttatttttaagggacttgattgattgctgaatcaacagacacataaagggccaccatcccccaggtctcatttgttccatgataacctcattatgggtcatgaagcaaggttatgccatggaatcgtttatatttccagttgttcatgtgttcctaacacagcagtgcagttatacactgggtacatgtctttgtctctcctggatcaccatgggctcctgtcccagcagcaacttgtacctaggagctgaagggagatcaatacaaactccttatgacttttagtgctttctggttacactcggtgaatttaacccaggaggtcccctctgatacagctagcagtctttgaaccttttttcaggactgtgtaagcattataagttttcatggtgtatggcttttgagttgattttgttgttcttactctaggctaactttttatgtcttatttttaacagtgaacataaagattctgaaaagaaacacaaagagaaagagaaaaccaaacacaaagatggcagctcagaaaaacataaagacaaacataaagacagagacaaggaaagacgaaaggaggaaaaggtacagaactttgccttaaggggaaacaagagttaagatgtacttttattttgaatactttagaagtggtaatgaaagtaactttgttatatctacccttgaccctgtagcagacttcaaaattagcaggtagtgctatagcaaaaactacaactaaacactggcttccttgcaatgtactcattaaactcctcactccccaaacaaaaaagattttagattcaatctgtctgaagctatgataaccaaattatttaacaccatgtctttaacaatgcaataagtatgtttattttatactacagtgtgcctataatgtttctggaaacatcttttctgttttagggaaagttttgtttttggaaaacctaaagctttattgggtctcctctgattgaagattctggggctgtgtctatacttagttgatagactgactaagtttgactagcatgaaggaagtcttatgatttccagcactactaccaacagttgtgtttgtgtgtgcctgttattctagcacttgggaggtggggagatagggcgagtagaaacttaaggtcatacttgggctacagagtgagttcaaggtgatcccnnnnnnnnnnnnnnnnnnnntgtgtatgtgtcaaggtttttcaatgcattgtttttttgttttgttttgtttttttgtttttgttttttaaagtgaaaaagaaatttgtaggtgggcaatcatacactagagagggcaggaaatagactagtctattttatggtaccctcaccccactgtgaggctcgcagcaaatttttgagtagtggatatatttattggggagatgaaatctactgttattttaagattaaaaagttgctgttttgaggaagaactttctcgattaatttcaccagaattgtcaaaaaacagccctgggaaaatgtctttagttgacccacttcagttttgctaacaagaagagtcagtccaggatcaagatgctccaaaatagcctggcatgatcttgccattcccgaacactcaatgactgtggttatcagcacaggacacgagcagtattgagcctgtcagcattctgtcttggagaagggtagatgaggtctcttccttgaagactaccatccattaatggttattagaggaagttgagacattttctcaggtggtatagtcactgttaaggtgcctatctacactcctataagcaattctgattcaactcagtgggacatccaaaaagcaggaagaaaagacaagtcatggctgggaaggggatcattaggaacggggagtgagtagatccgagtacctcatatacttgcatataccataatgaaacctgctttatgtataattagtgtatgctaacaaatttaaaatctcccaaattgatggtaatcttcttgaataagagttttttgtcttgttttagtattaaaaactttcaaagtacttactgagaggctgtggttttaccttgcagattagagctgctggggatgcaaaaataaagaaggaaaaggaaaatggcttctctaggtaagaccttttgctacagcagctttttttgggaggggggtgtgtgactctgcatggtggtgtctaagcttttccaacatgaactgaactagccaccttgacaattcaaaaaaagtcagtattaagagcacttgacctaggcaaactttggttttttaatagttctagttagtgagactgaacagcatttatccagaaatctaccagaaatggagaaggctatcagaatgaggtttttttttggtttttcgagacagggtttctctggctgtcctggaactcactttgtagaccaggctggcctcgaactcagaaatccgcctgcctctgcctcccgagtgctgggattaaaggtgtgtgccaccacgcccggccagaatgagattttaaaagttgaggtatatacataccacaaaatttgctatgctagcatatatatagcttatgggcttttatggtatttacctcactatttcccaatatttcaagagaaactccttggtagtaattatggaatttcttagtcttaaattaattcctcctttgtaatataagacatacgtaaacccttattggacttaattttttaatatagtgtatattacctataggctgtttttacactctgcagtccatctgttctgttttcctcattttcagttccctaaagtaagtgctcaagtccactctagattgagaagaccatttaagatcacattgtatattctgatgtcttccatggaaccacggaatggatttgttaagacttgttgaaagcatttgccttattgactgtaacagagttttaagagctttgctttcttgagactttgtatccaggtcctttagaaaaagagaagcaggtgccttttatagggatattttacaaatggtgtaagaaagcagaataataaagttgagtaagcattctacaaagtaccctaggaattctgttaaacaataaaatgaggctcacgatgtctattctttgccaagagatcctgcaagatatgaatagattatttgaactttcgtcatgaattcacttaatgacttgggggattagaaggacaggcgtgtgtgctttgcccccgattgtcgttgctggcctgcttgtcagcagtgagtcctgtagagaatccagatgcttcacttgaacttcatcttcgaagtgtggtaactcactatttgctttcacacacgacacttaggatggggcattaactttgaaccattggatgttgtagtgtcttctttggatctccagggctttgtaattgaaggcgaaacagctgtagaagtggcatttaggaattggggaaaatgtgctggaataagaagagctaatctttttaaaccttcagattttgttgcaagcaaactggttttaatgcttttagaaagaaaggagaatacattatctatacttcatgctgtgaatatattttactgttgagactagatacttacacttcagatccaccacttcatgaatggcagctttattttgggaggccattttctttactgagttaagtcagtgaggtctaatttgaagagatgtaacaagccaacctaggaaagaacattccaaggtttctgagtgtttgtccgtgtcaccggcaattctccttccccttccccttcccccatcatcatcatcactaccaccacctcctcctcctccaccaccaccactaccaccatcaccatatcactataagatagctgacatacacgctcccctatctcattattagtaaatggcagagtcttctgaagttcagagtggcttgaaccattacataaaccaagacgaacctccactcctgctcctcctccttaattgttggaagtgttgaaattacagacgtgtgtacccaacttaatttaaaaaagaaaaaattagatatttaaattttacgtgtatgagtaaatgttttgctcatatgtatctgtgcttgcctatttccatggaggtaaaaatgaagtgttggatatcctggagctagttataggtgatggtgagcttcctggtgagtgttggataaatctgggctccttgcaaaaacaagtgctctataagtgctgagccatctctccagacccccagtttattctttctagttagtacaggtttcataatgtcattgtactctggctcataaattctctagatagatagagattttgcaaaggaaagaaaatgtgacattcttttctcccttgctataaacctatcccgttctattttcatgaaaagattttttttttaaatgtatatgactattttagcctcatgtagttctatacaccatgcctgtgcctagtcactaaagaagatcccctggaacttgggtctatgctttctggaagattagtaagtgctcctaaacattatgccatctctccatctcctttcatgccacatttttaaaaattgagggttttttgcataataaagaaaacatgttatttcttctatttttccctgcaaataacacaattttattctttatgcctgaataaaattccattgtgtatatgccatattttctttatccattcatctattgattagcatctacactggttctggatttatactattatggatttacagagagatccatgttttatggtgtactgacaaagcttctcttgggcatatacctaggagtagtatagctgggtcatgttgtggaagacctctataggattttcatagtgactgtaccagtttacatcctcagttgcatttttttttcacatcaccttttattactgaaggaattcagggcaggaacctggagctaggagctggcgcagaggtcatggaggggtgctgcttactggcttgcctgtcatggcttgctcaacctgctttctcagtgctcaggaccagcagcccaggggtggtcctacacacaatggactgggttctctcacatcaatcactaattaaaatgccctacaactgtatctttagggaggtattttctcagttgaggtcccttcctttccaataactgtagcttgtgtcactcaggtggacattaaactaggcagggcacctactttatgttatttaacacaattctgacaatttagtaatccttaactagctgctttgttctctctttagtccgccacgaattaaagatgaacctgaggatgatggctattttgctcctccaaaagaggatattaagccattgaagaggcttcgagatgaagatgagtatgtatttcttccattttgattaaagtggaacatataaagaaatttcaattttgaaataatgtttgttgctgcctgattaacaatggtaaaattggaatcaaccttgttcatcaacaaatgaatggctaatggacgtgtgatctgtgggtggatagtagaatgtgctgctcatctctatagaaacatgaaattaatagttttataggaatatggatggatttaaaatatgtaatagcaagcaaggtcatataatctcaaagaaaaaaactcacattctctcctggaattctaccaatactttgaaggaagagaataggaaaggctaagtaattgaaacagatgaggaagtactgaatgcattataaacgaggatataaagctaattgtttttctacttctgtttttatgtggaatcttctttttttcctcccccaccctctttttccccatttggtggtagataagggcataaactacattcagtattgaaaatgtaaaattgaacaaagctgtagaacttcattctgagtgcctgtttaaaatataaatgttcattgaactagatctgttagttttagtatggtaatttggaagagtttatatatacatgtgtgtatatatatatatgtatatataaatttataaaaaattataaaattataagaagagatacttcataatttttattttatttattttttgtttgtttggttttttgttgttgtttgtttgtttgtttgtttcgagacagggtttctctgtatagctctggctgccctcggaactcagaaatcagcctgcctctgcctctcaagtgctgggattaaaggcatgcaacaccaccaccggactacttcaacaacgtttaaaaagaaaaggccagagccaggcatgatgccaccgcctttaatcctattactcaagaggcagaggcaggggatctctaagtttaaggccagcctgatctatagaacagggtctaggactgccagggctacacagagataccttgtcttgaaaaaataaacaaaacaaaacagaagggaaaatctgttttaagaataaatatgtgtatatctataattaataataatatattaattggcatttgtggttaatggactaatttatgagaagtgggtttgctaagcaaattaatttatgggttatgtgtaatgtgttttttcttactaaaaaaataatgcatatttattatagatatttcaaactatttcaaaatagaattagtgacgggtaaactattttagatccttgggagtttttcagttttgtaccacaagtaaattgagaaatattaggttagggatatatagctcagttggtagaatgcttatctaccacacaaaaagccaggggttgatcccagaacctcatagaactcatacaaacctcatataccaacatttgggaagtggaggcaagaagatcagaaattcagtcatttttgactacagagtgaatttgaggctaacttgggctacatgagactctgcttcaattctttttccttctaggatctatgccttttgatataagggaaccttcaatgtacagagatagtgaagttgatattgttatttaaggcttacatttacctccaatgataatgtattccattttactagttttgagtattatattatataattatataatacttattctattctatgagatagtcacaggatttaagatggaatggctgaggctgtagcacagttgataaagtacttactttacaagcatgaggacctgagtttgatccagagctcacatacaaatttcaggtgtgctagagcatgctaggacttggaaaggcagagaccggagactccctaggactgctggcaatttagcttagcttacttagtgagctccatgctcctgagaagccaggtctcaatggagcttgagaatgttctttaggaggacagtacaagttgtccattggcttccacatgaatatgagcattcagacgtgtgtgcacttaaataacatttaaaaatcaaataatggctacagctatagcttagttgttaagagtgcttgctgttcttctagagaactcaagtttgtttgccagcatccatattaggcagctctttatagcctctagtctgtttctgtctgtcttttatatttatttcactttttatattatgtcatgatcctgaacatttatatgtataccatatgcatgcctggtacctacagaagcctaaagagttcatcagattctttagaactggagttatagattgctatgagctatcccatgtggatgctgataactaagctgaggttctctgcaagagcagccagtagtcttaccagcttgaacatctccccagaccttaatctcgtcttcactaccattgaattcctatcaagaataacagcagtcacctgccatggacacttttcaaagagttgggagatcctaattctataggtgagatctcttgagttgtagttgcaataactgcatattcatgttctcctttctagtgctgattataaacctaagaaaattaagacagaagatatcaagaaggagaagaaaagaaaatcagaagaggaagaggttagtaaaagtttttgaggcatacatttatttgtataaaatagccttaaaaagcatgagattatttttaattgtgggtatcatgatgcacatgtggaagtcagaggacagctttgagaagtcgattctcctggaaattgaacgggggttaagtttgacagcaggtacctttaactgctgcatcatcatctcttatgtcctaaaatagatcttgaggccaaatgagctttagaaaatttttggtttgttgtagtagttagagtggggaaatgttttgcaaacaagttgtggttgtgctgagtttgccaagattttgaagtatccagattactcgccacccttgagtctattcatagcctgcgttgatgttgataaagtatgccacctgtaggtatgcagaaaaatgttcataaggaacaactctgaaaattctgtcttaacaatatttcatgaccaatgaagcatgctctttcctcattttaaataaatgtagctctaatttaatcagtgccctcttggttgtaggatgaaatctaagcactggagtacctttcctcagtctggcctttgcatcttgtgccttgcttcattttgtccctcctgagctcaccttgctctggccatactggctgcctctgtttgtttttcacaccagattttgtacttcagatttcggtgtgtagtacatgttgttcttctgtctggaacacacattatttattcccttctactgttttataatcttccataatttcataactttagttcaagtacttttttccaaggatcctatttggtgcttgtggtagatataaatagaataatgtagttattttctttatttttttaattacttgtatttacttgcaagaattttttttaaaaaaatcagcaattctttaggctcttaagtagagttcttaactttatgttcattctgtgaggttaatcaatgttgtggacaaaataggcttaaatgtggttaggttaaaatgtaccagcagtcataatagtgataatggggcatgggcttttgagattgttatctcagggtgagtatggtgacacacacctctaatcccagcactcagaaggcagaggcaggaatacatgagtttgcgtctacaaagaccttgtattcaggaggcacagagaaagtaatttgatcagttatggtgactgcaaaattgtaatctcagtactttgaagactgagatgggagaattatgagatcaaagtctagcctgggctacacagtgacaactaaatatgccatttattaagaacttgatatgcaggctggagagatggctcagtggttaagagcaccgactgctcttccaaaggtcctgagttcaaatcccagcaaccacatggtggctcacaaccatccgtgatgagatctgactccctcttctggtgcatctgaagacagctacagtgtacttagaaataataaataaatctttaaaaaaaaaagattttaaaatttttgtatatgagacccgcttgtaccatgtttgtctcagatgcctgcagaagttagaagagaacatcagagagagagagacagagacagagagataaggagttttactctgtgactcctggcaatcctcctatctcccccttgactataggtatttttagactcgagccaccaacagagtatttgaatgctcttctacttgcacacttgtattcctcattgttacttaaaatgcaatagcatagcatttgcttttttcatccttaaaataatacttaaagaccttcaagtttattactactttgattaccatcttattacagactcacaggatattctctagccattttcattcatcatattctgttggtttttgtttgtttgatttgaaaatatacttagggttttattttgttcagcagcagttatataaacttgatcaaatggaaactgattttagaactatcttgattattgctggaagagaagaaaccaaatagtttccattccataaaccatctttcattgctatataaaacttaccaagtaaagcctcatgtgatgctgaaaatgtagatcaaagttaggttcttcagaagaaagtagattctctggagtctgcctctttacctgttgagtcacatttttgttgggatgtgttttggatttgtcttactcttgggtttgaagcttttttttttttttgtttttagagttacacacccacggttgacctcaaactcaaacgatccctttgtctctgtctcctgaatactaagattgaaggcatatgctatccccagcctattttgtgtttttaagattggaatctggcagtctgtctttgaactcctgtggctaagttactactgtttagacacacaaagacaggatactctcaacttcgctctcaacctcgaacttcatcccctcactcccttccttccaattcctgtcctacctctctcctaactttgcctctcatttattgtcttaatccactgagcccacttagtattttcttagaacatgggtgtggtgtgagcatagttagcctctcaggacctcaatccctgaagtaaacagactcttccctaacctagcagtaaaggttttttgggtttttttgggttttttttgggggggagggggggaataggggttctctgtgttaaccctggctgtcctggcctcaaactcaagaggtccacctgcttctgtctccctaatactggaattaaaggtgtacgctaccactatgcctgactttttttttttttttttggtatgcttttactatgtatgtatcatgacagttcctgctacagcttcctttagtgctagaatcaacaggtgtgcactatcatgcttgactggtgtgttttgtttttttgtttttttttttttttttactttgccactgcgagcagttcccagctgagaatactcttaactttgtgtatataagcaatagtaactgaatcacagaaatctcctttcagatcaaatactaaatttttcttgtatttcttttctatactttgttatatttaaagagattaaagatgaacacactttaaaataaatgaagaaaataccctgggattactgttagttccccaggctttcccttgtgaaattcctaaataattgtttgctagagggactgcgggaagtatttactcaattgtaaaatatcaataaatttttcccttgatttcggggaggaattagatatacgatcttttccagttccaggacttcttgttcatagtttttcttcctagtggcttccaaaaacagcttccaggcgtgtaaacaatcctgatttaagtgctttctgtttttttgtaggatggtaaacttaaaaagcccaagaataaagataaagataaaaaagttgctgagccagataataagaaaaagaagccgaaaaaggaagaggaacagaagtggaaatggtaacatctcagcactgggttaagatgtcagcactttcactgtgcagcccaattaaacaagagttgaaatattaaggttaatttcttgacatttgatggagaagtacttacagactcttttgaagaacagataagttttcagatcctagtaatttaccagctctaaatctagtggatctcaaaactagtttcttctcattgaatcggattgaatatagcttatatatagaagggacttcaaaatgaattcattcattcattcattcattcattcaatcacttcaaattgtacctagtagtattataatatatcagtgtatatatactttatgtaatgtttaaatcaggctaagtctacctatctcataatacattctatctttatgctgagaactaccagcatactttcctgtgtcagtttattattgctcttagaaatgtattcactatgtaaagggttcttttttttttaatctataaatcattttcataaaactgccaatttgcataggttttcaggtctatttgtcttttttcctctctcaactgacctcatagagccaagtttactcagatttaagaaaagcatgcataagcttaaagtgtactagaacacctgctactcttgcaaaggacttatgtttagttatcttctcataatcctctatagctccaccctcttctggacaaacatcatctttttccccaaataatccatcttttaagacaaccaaaaacaagaacaagaataattctaaacagataattctttaccaaaagacttggagaatggccagttcatcacctatgctaggttgaagtttcaagtctttgggcaaagaaaaatgttaaaaaagaagctagggataaataatattgtataggaattactgttgaaagaccaggacttaacagtcttaacaatgacaatgcttatgcaatacatacatgcatacatacataattaagaaaccttaaagaacaagcattatcatatcttctccaaatcagagtctgttcttcattctagacagcttccagaaatctctagttttagatttttatctacaaatctttatttttcataaattatatagtctgttttaagatacctgctaacaccaggagaccttgacttgagaaagtagtaggcctatgctgttgctcaggctggccttgggttcctggctttttttccccttagcctcccaagttactggaactgtaagccaatcccaatcccattatgtccaatacggaattctttgtgtattatattaactctttataggatttttaacttctgagctattttctattcatttttagactgttaaactttttgtctttccaaggaaacttttttgtttttttttaaataaaactgctacctaacttgaatttataagcctacccttctttagttggtgctggtgttggactgttagaaggccaacactacagttttatttgtatggtagtaccggtctgtttaaactcaaggttttgtgtttagtgattcattgaatctttgcttaaatggtaaggaagttgttatttgtcctgaagaaaaaaaacatgttgaatttggaggaattgtgaaacatggcttggaatcttaatttcaaaacaatggagttgatgacaagaatataaagggaatggtattctgaatcactccccggttactatatgactattaaaacagatgagtcacttgtaggtgctttcacatgcttgcaaacatttttctctgatttggagagtagtaaatttgaaggttaggtagtttctatctgggcatttgacatcagctagtataataacgttttatctgtaaagtggttgttgattatacaaagtctttattgttccctctttttgtttttcgagacagggtttctctgtagagctctggctgccctggaactcactttgtagaccaggctggcctcgaactcagaaatccgcctgcctctgcctcctgagtgctggattaagggtgtgccaccacgcccggcttattccctctttataaaatctttaagaaagaaaataatacttctttcttacaatgtaatttagatgtatatttacattttgtcatcttattgtaaataagctgtaatgagaaactgtacatccattaagaggcaacaaaaagaagttttggtgggactgaaatagaaaaattggaatcttggagagaatattgtatagaatacagggaggtacgtctaccaatactcagctttcctttgtccttactgctgttgctcaggctggccttgggttcctggctttttttccttagcctcccaagttactggaactgtcagccaatcccattatgtccaatatggaattctttgtgtattatatcaaccctttttaggatttttaacttatgagctattttcattatgagttacctctttttttcttgaatattccatttgatccatagggttttttgtttttgtttttgttttttaaattttgatgtaacccaacttatgtggttttgttgctgttacttttatatttattgtatccaggaagtcactgccaaattcagtgtgatgaagccattccctcttattttctcctaatgtccaaatgagctttagtttttataaattagaattttaattcctgattcatatagagttaatttttgtatatagtataaaggacttgccccagtgtcattctcttcaaactccagtgttgaaactctgtcatctctaaccataacatgatgataattcctgtttaaaatgacttgccaatatatgttgacagtaattttatataacagtattgttacagcttaaacggattcatttatctcttaccctgtgattctgaatgtttaaaatatgggacttggaattcatggaattaattaacagcagaacaaggcagaactatcccagcactcaggagacaggcagatcaagttcaaggccagcttggtctacagagctatttccaggacagccaggactacacagagaaaccctgtctcaaaagacaacaactacaaacccaaaccaaaacaggaatccataaaattccttttgtgtagaagtagcagtaataagtttgagaaatttaaaagtagtctgtatgtatcagatggattcttttacaactctgagaggggtggtaagatctgtttatcagtgtaaagggtgtgttagagacacatccatatgtaatgcccaaaatcagtagatttgtacttgtaaaatactggatctcattggtgaatttataaaaaataaagtgacacaaaaaaaatcaatctgatgttatagttctatacaagatcagttttataaagataattgctataatatttattgaactttcacatccaaaactaattttgaagtgatcagtaaaagtagaaatgtaataaattttaataattctttgtatatatttacagttaattgtttttatatgcttaatttttttaaactttttttaaagatttatttattatttattattatatgtaagtacactgtagctgttttcagacacaccagaagagagagtcagatctcgttacggatggttgtgagccaccatgtggttgctgggatttgaactcaggaccttcggaagagcagtcgggtgctcttacctgttgagccatctcaccagccccctatgcttaatttttaaaaaataaaatgttttagaaagatatttattctgcagtttatttagatttttgtcaagtatctacgggatagttccctgtatttcagaagtgccttaaacttagtgcacctccattagaatctcctcagtcctcttgcgtttgtattgttggttttcttgagtccaggtcttactatgtagccttggctgtcccagaactctaccttctgctggtctcagaattccacactctggaactgaaggcatccagtctggttgtgctttgaattttcaaatagggctgctttcttctaaactctcacctgcatgtgccatcagtttagtaatgcctcttttgcatgtaccactgtggcatattttatatataaatagttttatatgggttttttgagtgatggatggtcttttaatacttagtatctctaaattgaaactgttgaaatgaaatttttttaattaccatattctttcagtttgcttgaaattgctgctcttttcagtgagacacagcctttgaatgggcaccacaaattgattagttaattattttgaatttaataggtgaggatctttttactaagccaggtgatcacttaatgagcttgtgccttgtctttgaaaggtgggaagaagaacgttatccagaaggcatcaaatggaaattcctagagcataaagggcctgtcttcgctccaccatatgagcctctgccagagagtgtcaagttttactatgatggtgagttatttcaggttgtttgaattttggctaagaatggtttgtttctattcagggttagaaaatgagggcactgcctatattgcacagtcctagctagttatttcactttgttttattgtctatgtgtggcttgggaaaaggaatctcaggtgtttaattcagaaggacccctttgctgcttgaaaaatatgaaaaagggggctgttaatgtcttatctgtagtctaaaaaggtttatctgtttggctcacagcctataaaatacacattgaaggtttttattttgagtgtgtaactcaataggaagctgttctgtattgagttctcatttaaatagtagcacttagtgataatatagtatgccaacatgctgcttatcactagaaattgtattagcaaaggattagtggccatcattcagcttataggtaagaaacctaagctatgtcactctaagtagtgcaactgtgcctttgacaggtgaattttaaagaaacgctctgcctaggtctcttaattttatttttttgagacatttctaactgtgtagccctgcctggcctgtaacttgataatatagatcagctgtccttgaattcagtagatgtacccatctgctcctgaggcacatgccaccttatctggcctccttgggtctcttggaactttctaaaatgtctgagagttccacatctgtgtttttgtccttgggttgagggatctgagagtagcctctcacaatccttcgactgactgtgtatcaggtagtaatgtccaactgactccttcattctaagagttctgtccagagatgctagagttcgttctcaaactctctatgtatttataattcaccaggttaatagatgagaggtaggactgggtgtttatgaatcaaataaatgtatttactaacagggagagacactggacaccaaaatagcaaaaccattcagagctatttggtgtatctctttttttttttttttttttttttttttaaatttatttatttattatatgtaagtatactgtagctgtcttcagacactccagaagaagagggcgtcagattttgttacagatggttgtgagccaccatgtggttgctgggatttgaactctggaccttcagaagagcagtcgggtgctcttacccactgagccatctcaccagccccttggtgtatctctttaaccgccagcaatggctttaggagcatagatgcctgtgggtttaggatgagacgggtttattagcatccaataattgaaatctgtatatgaaacaagtgaattttgacctgggtctcatccttaagatattttatttctctctctccctccctcttttttttttttttttttttgagataaggtctcatttttgtagtcttagctggctttgatctcagaggcctgcttgtctctgcctgagtgctggaattaaagattcccatcactgattactaataatacccaacctgataccttatttttacaaacacacccccacataccgtcattctccaaaatctaggggtgaaaaaaatgaaaatggaaaaaaatcacatgttttgggaaatggatgttcaactaatattttcgaaaggttcggaaatgtttattgaatatgcttgtgttcagacacccaagtcccagatagatagagactactgatttaatctatgtaggaagtcagtggcataaaacacttggtggtgtgactggcaagtttttagattagctaaccagtttgaccagaaactgtaagacaccctacacactagatcattcctgaagatttacgaaaatacacaaatttaaacttcctagtgaagagaaaaggccttaagaccttgaaaaagacaattgctgtattctgtagcctgacctgagctcactaactttagacagctcgctggaaaagcctcactgtgaaagccaaggtgatgacgatagaaagtagtttttttttttttttttttttattgtggggtttcaaggaaactaaggcctgtggtccctacctctagtttccttttctctgttggtcctcctaggatttcctccctttggttataaaactcctccaaataagtcaagagtgtttgacttactagtgcaaactgataagtaagtactggtaggcaggacattgctgccttgccctggacttccccctggccgcctctgcacaggacatgagttggctgaagcacagaattgcagccgctgttaaggacctgccatttcaactctgactcaacagtttctttttgtttccgggagctcaacttttcccacaaagtactacgatgattgctgggaacctacacaccctccaccactccggtgctatagctgttacttaatccttccacagcccatttaaaacaaatcaagtaggttctttgtgggtgggacaaagccagtgcagtgcaaaggctccccacccaaaataagaacactattggggaatatttagtttatgaaaacaaacataccagggaacacattccttaaaatttccttatctatttttattttttgttttgagatgctgattttgtagctgagaccagtttcaaatgcacaatcctcctttcccagccttccgaatgctacaattataggctactgctaccttgtctttttgcccccatttgtttgtttgtttgtttgtattcccctccattatatttgaatcatgttgctgttttgctggcaactcttgttcagactgagtggggaaaacaggaaacaccttactcaaaaaatccttttccaacacagaatcttgagtgtgctgaggaagagctacaccacctatttgccttttaggttatgtcttctaagctgataatgtacctgtagcacaagtttgttttgtgatgtattccctatgtttcatacagtctggttgagcaatactacccattatgagatgagatgtctctcaattattacaatgagtaggcttctggttaagttttagatttctgtaataaattttaattcttttgaattattattagtacttacatagttgtaagtgtgagatattaatctcatttagaatgcagcaaaatgctattgtggcataaattgtttctatataatattataaagttgatttttttttttttgagaaaagatagaaattggccctaggagtgcaatattctctttgaatattttgtagattaagcttttaagtacttttctttcactgtcagttatgatctatctgaggacacaaaatcacttccaggatttattaactattgtagtggctttccttgtgaaccacaggcttttttggacagtctttacatatacttacttgctgcctaacccaccctcacctcatgctgtggaatgattagactttcctgaaagaagtgagttcctggtgctattcccagtgtttcaggtgcatgtgtacctgtatttcactctgaatacactagtgctccaaaagtgcttttctggctgggaggctggctcagtgggtaaagtacctgctgtaccagcctggtgtcttaaggatgtttttttagaaccacatcaaagtagcacacttgtctgcaattgtagcgtgtccctgtggtgagaggggaagtggagacgagaatggatgagtccgtgccagctagcctctatatatatatatagcagtgaacaaagagaccttatctcaaaataagatggaaggcaaggactgacacctaaggctctgaccttccatgggtactgttgtacacatacaaccccacacatagacatacagtgcagtttttgattctaggtataggactgaggcccaaaacttggtatttataacaaacttgcttgtgatggttttggtctgtgaactacttgagtagcaaggttctagaggaaggtcttatttacgctttttatgtgggaaatctgggcttgcctgctatgaatatatattcttattcatattccacccacgtaactttgaagaagaaagatgcctatttcttttccccacaattcctttcttccactccctgcccctatcctttcctccccttcttgaacagaggctgcttagcttagcagtggcaggagtccttctgaggatttgatttttaaaaaccattgaagaggtgtaaaggaccctgcttgctgaaaggaaaaggaagagtggctgggccttccccaggtcatccctgtcctgagcaggcacctgggaacaattaactggcatagtctccaaaaaaagacccaggtaaatatctactaaagagaaggagaaatttttaagtagatctctgacagtatgttactctgttgttgttatcactgtgtgtcagcagacctttgtacaccttggaaaggtgagccatcagtcatgacctctccagtgttcagtgcacatagaatatgaatagtgtgcctcactgtttggaaccattttcttccttcaggtaaagttatgaagctgagtcctaaagcagaagaagtagctacattctttgcaaaaatgcttgaccacgaatatactactaaggaaatattcaggaaaaatttctttaaagattggagaaaggtattgtggcccatgtgttcatatcttaatcatttataaaagtgctgacttagaggtatagctcatttgttaatgtcttgtttgtttaaaaaatgcaaagtatagtttaatgtatatcttttttcccttactattttaatgtggtttttgttcaacaagaatatatcccttctcagctttcatgtgactgcaggaaggagcttatcagattaggttaaacagaaaacctcaaatccagttgagcaaaggaagcattgtttctgcagggactgtcctctgatgcctttacacagggtcagtctgaccatctattctgtattgatataaaaaagtaccattgttttcaatttggataattttgaaaagaggttgaattaaaattcaccatccaagggcattctaaatttaataagagcagattagtgtgcatgggaataagaaagtatttctctttattgctaaagtaattgattaatataggtctcttggattggtgtttatatgtttgagtttgtgtttttgtcaaagatcgctaaaaaatgagtaattttctttgataaatgactaatgatattttatatgaaactaatcatcttataacagagcagcaccactccccagaagcaatggttattgaggttggcttcccttctagacacctttgattaaaggggaaaaaggatgaattttgaagagacaggaagacttattaatatatttaattttcttaacctttttactcaattaggaaatgactaatgacgaaaaaaatacgattaccaacctaagcaaatgcgactttacacagatgagccagtatttcaaagcgcagtcagaagctcggaaacagatgagcaaggaagaaaaattggtatgatcgtctgctaaactagaaaatcttggatagtgattctttgtataattttttgcttcttgtgacacaacagtgaattcattacttttatatttttctgtgttaaagatttacttagtaaagtataattacatgtatgtgttgtgctaactggcagctatctgtgttggcacatgcctgtaatctcagcatctagacttgagcaagaactatgatgtctccacaaaacaaacaaaatattgcattagacttctttaagttcattttatctgtagttttccaaatcactgaaaaaaagtgattctgaaagtgtgcattaaattttacactttcaccatcaaatgcatgttttatggacttatcccctaccacaaaataaaccaaaacaaaatccatgacagtgttgaaactaaaagggaaaaaaattgctttatacccttttgtgagtctgtgttttgcattcaatccttctttactacccagcatttacctctcctctttctaaggctcacatttaaaaatacctaggaagggctcagttggtacagggctttcctaatgtgtgtggaaccatgattttgcttctcagcactgcataaaaccatgtgtagtgatggtacatgcttagagtgtcagcccttgggaagcgggggatcagaaattcactgtcattctcagttacatagagagtttgaagacatctggggtacatgagaccagatacttaaactaagctacactgaaaataaatgacatttataagtctataccctttgtaatgaagattaagtgttgaagcactagttcactggtagacacagttctgtaatactacaaaagacaaaagttgagaatcttatttgtgtaaagtcagttattcttgatagatcttttggcagtttattttatatatctgtaataatatatgtacgtttaaaatacactagacattttcctatattttagtttgtttctgagtgattttaaactttaccttgatctttcttctgcaagagataaaaatatgtaattcttagcatgtaggagtttgaatccattttgtatacttccttggtctattttagaaaatcaaagaagaaaatgaaaagttattgaaagaatacggcttttgtgtaatggataatcatagagagcggattgccaacttcaagatagagcctccggggcttttccgaggccgagggaaccaccccaagatgggtatgctgaagagaaggatcatgcctgaggacatcatcatcaactgtagcaagtgagcacaaaactctttaggggggagaagtgggtgcagggctatttcctcaaggctggttattgggactattcctagtgttatgagagcggtgcagcgcttgcatgggcaggtctcccaagtttgttcaggattgagggcaggatgagaggggacatggtttgtcacttttcatttcattttctttctgaatggttatgttcatagagacgcaaaggttccttctccccctcctggacataaatggaaggaagtccgacatgataacaaggttacttggctggtctcctggacagagaatatccaaggttctatcaaatatatcatgctgaatcccagttcacgaatcaaggtaagcataaatctaggccacatccattggtggagctaatatagtaatctcattctcttttggttgtattgtaatgtgctttctagactcattttaacaaatgatactcatttcaacaaattaaaaacctaccctctccctggcttcatggttagttagcattacctagtaaactcttattaaagatgttttacatttgtgtcctatagtaatcttagctgtggacattctctgaaatcccattatgttctgagtgaatgcatgtggtaataatggttgtgcaggtgctactgtctggtggtcaggatgtgatgaagtggctagtaggcttatgtgagaaatgtagatactatttttctctaaatatagagacaactataggacctagagctttatatactttatgttttctgataaaacatactttgtctcatctgagtaggttcctttaggttgtgattgaaatattgctagcccaccatgtatacatactcaattgttttcaattgttagatttactgagagggactgtctctgatcttgttagccaggtagctataaactctgtgttctttagcattttataagctccttccatcagactttatggatatatgaactacaaataaaagagacattgggttcacaaaaaaacagccaagaaaattggctctgtgtagcctatagaactgttttccattgaagagtctaaagctaaagaaacccttgttcctaaggatttagcttctgttaagatccaagagtcacagatgaaaatgctatgtaaatttacatgctttctagcttatatcctgtgttctgacatgtgtctctaccttcttaatgaaaaataccatctggatactttcttcaaataaattggaaaatagtatctgtttcagaataagaaaataatcagaagggagaactgagactcctttattcctttcttccatgagatagtttacagaactacagaagtgggtaaagaaaccatgtttttttttttttttctttatgggtgggcaaattgtgtaaggatccagttgtgttagaagaaaggtagtcgttcttgtacataagagtagttattcttaacatcagaatggactttttaaaggaaattagattaaaatgagctctttaaagaggtcttctaaatagacccaggtgcttatggacaaaagaggaaggtaagttggtctacagggatgtgacaagtaccacacagtgtcaagtagggctggggaggaagctcaatggataagaatcctttttgtaaaaaagacctgagttcacctctccagcacccacataaagctacacatagccatgcagacttcagtgttgggaactgtcagaagctaggagctcctggctgattgtggtcttcagtttcttaatcaggtggaggggctaacgagataactcagtggctaagtgtactggctatttttcgtgattgccggtgtttgatattcctagcgcccatacatacaacagtatgaggtagagaatctcctcatgcttacagagttgtatgcctacatgcatacatacatacatacatgcatacatgcatacatacataccacaccctgtaatgtgcatgtaccacatataccacaactaccaagtagtagtggttctatatataatattattaatatactaaatgtcacattaatggtacattctatatatatatattcaccacagtcagtatattgtcagtctgtgatgagtattattttagtgttaaaaagcttttcatgtaagttgacatttaataactattacaggcatatattcacaaataaatttagtctgtgggaattaaaaaaaaagtcctacatctgatagctggcaactcttctcagtcttcttagaatgtaatttagatctccaatctcatgctttcccatgacatcctggtgtcaaattgtggccagtcttaaataacatgcccaagaagacggtcttctgttccgggaagagaaccctttaaggactttgaatgaaggctctcttaaacatgggttaccaatttcagcaagattagcaagttattacaccaataaatataaactacgagaaatgctgctgcacagaagtatcagtaccatttaagagcatacctcagtgctcaatcttagctcagtttcaggaaaggcttttccacaaagataatatttaaggttgtatttgtgagatgaataggaatctcatttgccactggaaagaaaaacaaagggaattagcatttcaaagagggaatgagaacttttcaagtttctgccatgagaaagagctcacgtgtttggagaacagagtgctttgagcagtaagagaaatgaagaaggccccgcagaagcagacaggccaggacttcagttccaactttttaaatgagtctaaaaggaagctaccgacctagacagacgtaaagaagaaaataggactggagtggtgacataattgatagttttgactactacttggtgtatgtagcctgtatgtattgaacacaaacaggaagttaggaggcctctagatagctcttcttcaggcaagaaactgtagtgatcaaggcaggtgatagcagtgagagtggaggaaaaggagtagatttcaagtatgtggctgttgtgtcctcctataggcaaaatcacaggaaactgtagttctcacaagagtgagatagatacctgctaggcaagccagagcagcaccccaaggacagaggtgcttagtctaggcagtaataaccagataactgcatagtaaggatttttctaggtttcttcaagatggttttgaccgtaaacttgaaaatcaccccatgatagaatgcttgacttgatacaactgggatgagattccaagagtagtcatcacaggtctggaaaggtggaactgctggcaaccaggggtgaggaggcagtgcctgtggcttcttgcagttgctctcagtcttgtcataggctccttcatctagcagaatagcagtggcttcagagggaagaatatgatagcaccatgaatagtgtactgctaccagagaattattccattcttaaataaagacataggttcaagctttaggattttttggtgggagggggcatggggttgttgttgctgttgttgttttataggcttctttatttttatgtgtgagtattttgcctgcataatgcatgcatactgttttatgtcccttgtgtttgcagagtccaataaaaggtatcagatccccagaaccagaggtagttagggacagtggcaagctcttcatgggtgctaggaaccaaatgtacttcctttttaagggcagagagtgcacttagtctctgaacaatttttctaggtctgagttttcttttaatgaaataattcaaatatgtaagaatgtcttgtctgccattgtcagatcttagcactttgtccaatatactcaaatcagttaattaaaaaaactactcttgaaggggggttggtgagatggcccagaggttaagagcactgactgctcttccagagttcctgagttcaaatcccaccaatcacatggtggctcacaaccacctgtaatgagatctgaagacagctacagtgtacttacatataataaataaataaataaatcttaaaaaaaaaatactctagtggcatagcctttatttaacctaatacttgggaggcagaagagtcgctttgagctgggcatggtggcacacgcctttaatcccagcacttgggaggcagaggcaggcagatttctgagttcgaggccagcctcgtctacaaagtgagttccaggacagccagagctatacagagaaacctgtctcagaaagaaagaaagaaagaaagaaagaaagaaagaaagaaagaaagaaagaaagaaagaaagaaagaaagaaagaaagaaagaaagaagagagagtgtgtgtgtcgctttgagtctaaggctatcctggtttttgtagcaagttccaagctagccagggctactagggaggccttgtttttttttttttccctagattctgagagatttcacatgttccatcaagtgttaccatgcaaatatacacatggaggatttatgggtggcactaactgttcataaaaccaaaaacttgaagtagtaggggggcatgggggacttgaggagaaatggatgatagatatcattttattatataaatgtatgaacatttcaaaagtaaagataaaatatgtggcaattcaaattattttttaaaagctgggcatggtaacacttgctggtaactccagcactggggagatgggaagggatccctgggcctggcttgtccaacagtctgacctaagtggtgagttctgggccagtgagagaccctatttcaggtacaagcctctgagcaaccagcttgagtttgtcttactcacaaactcaaagtatattagcaaatggcatcttcctcagtacaggtcctgtgaagagttaaaagcaaatgactcacttcctgttctgcctatattattgagtggataagtatctacatttaaaagaagtatggtggccactggtttataactatcactaactagttttttctccattatggagaagttgccaactagggaaagaggaaaaggagtcagagactcctacaatatctacctttgttttaccaaactgattttctactccatactagtaatgtgctgatgtagtaatagaatttgagggagcacatttctgccagtgtcaggaaggtactttttatgatggctttgatgtgactccctggaagacctaggtgggtattttttagaagcagtcctaaagggttttgagtctattatcattttataggttctgatcagcagcgctgtaagccaccaggataagcgtatttgggaactagcccttgcctgctagcccttcacaggatgtctcctcttcttgatcctcatcctagtgttctagagaaaactttgatttgttccaggaggccaatcatgtcaaggaaacactctttagtggtttcttctataaattacttacttgactttctcaaactttgtctgcctgaccacaaccaatgcttatgtgttttgtagtggtgaaaagagtccactcctggctagatagtgtattttagtgagtctctcaggtgtcttggtggtggtttatgtaagaaattgtggtagaggtacaccttgctttgtagctttgtaccaggaggatagcttgtattgtacattttctaatttattctcttaatgtcaagttggacttagagaaatcagagagaaattttcagcttcctgaaagttattgaaccccttgtttaaaagccaaacaagcccatacaaatagtacacactcagttgtgaggaaatgttgacgactccctagcacatccaaaaaagcattactttctgagcatttgttaagatctggaagtaagcctttttattccatgcacccccatgctttcatgtggtcctatgggttaggtccttttgtcttaggtggaaaacaatatacaaaaagaaatcactaccatctcctctttgttgtaggatctttaaatctcatgtctgtgtaggggcatgtgcgtttgagtcctgcagtgtgggaggcattagattcctctggagctggagtcacaggtcacctctgatatgcgtattgagcacaagtcttctggaagagagcagcatgggctctcaattgataagccatctctaaccccagattcttaggggattttcaccttgtaaaattctgccttgtggaattttcctgatctttctcacttgacattattgatccttgctttcaagtccttttctactcagggtggtaacagaaatcttttgttgtttaatatcagtctttattttttttataatattttttatttagtatttatatattttacataatgtacaactccacacttcccaactactaccagattccctacacacatcattctctcaactgtgactcagttgaaatagtggtgtccatatatgcatacataggggctgtccaatggggtgtgggaaagctaccaggtatcacacctcaaaagagaccactacaaatacacactagcagctatcaaatgtcaatagctcctcagctaggagttggggtttatgtatccctccccatttcatgatggaatgttgatactgtgcaagcaaccagagcagttcctgagtgcagtgtggccctaccatgtttagaagacaccttggccccagtcaagtttgtacctctttaagtctttccatcaccttttccgatgcttcctgaattttgaggtcagagtgtgtgatgtaggggttcaattcatgcctgaatatttcacagacattctgttctctgtaatttgaccagtcgcagccctggtattaaccaaatccattgcacaactcttctgatgaggaccaagtctgggggtgtacagatatgtgtttagaaagcagcctggtgccatgtccatttagcaaagtctcatcagtgcttttcttaacccatcagacctgtgagttccccagctataggttctcagataggtttatattaccaagcacgtgtgacattttcatgggctttaggatcagatctcaaactttatgccaaaagctcttttgttatgtttttaaagaagccaggtagtcgtggttggtgtacacctttaatcctaacatttggaggcagaggccagcagatctctgagttcaaggaagctaaatctatggagctagctctaggacagttagggctatatagagaaaccctgtcttgaaaaaccaaagaaagaaggaaggtgttcccagaaacattttttttctcagtcaaatcagagaccattttaaatgcagaagtgagaaaatggtgaataattacgcctattcatggaagcttttgtcttccttggtaattacatgttgttgtcttgggttctgtttctttgataggtccctgaaaccgctatggctgtcttgaatttaatggaattcagtgctagcagagaactggagcatgcattccacagcaaggctgtggtgcttctgaagcaatggagatgcttacatcctttatgttgacagaagtcagtttgggggcatgcttggtggatctcacaagagtgggaaccattttttagataggaaagctttcttagcaattatacaggacggagtcagtagaatagcaagtattcttgtcatgttacatgccccagactttctcttcagttctatgcttttccagctttggttaaaatcaggttcctgttttggggttcagagctctaaatattcaatgtgttgctccactgcagggtgagaaagactggcagaagtatgagactgcgcggcgtctgaagaagtgtgtggacaagatccgaaatcagtatcgggaagactggaagtccaaagagatgaaagttcgtcagagagctgtagcactgtacttcattgataaggtggggacatgttcctttatccacattggacagttctgtttacaggtatagggaatgtctacagtatagggatcaggaatgtatatctgctgtgtgacttataatccaaatttacttaagtaggaagagtagatgtggatacaaagaaagaggcatgtacagtatgttggctattgagcagtctctataacaagaggatctgcataaactgaacattattagttagtttgtttgtttgcttgtttttggtttttcgagacaaggtttctctgtgtagccctggctgtcctggaactcactttgtagacgaggctgggctcaaactcagaaatcttcctgcctctgcctcccaagtgctgggattaaaggcgtgtgccaccactgcccggctgtttgtttttttaataactgtgatgctcaagatttttgaccataatctgcaaaagtacttactttatgtcaaaatccaacataacagttttatttatgtgaaattaaatcgaaagttgcacaaaccactggttaactagtagcattgaattctggtggttatttctcatttcattcttttagaaaatgacaattataacctatacaattcttaaaaaagtgtgatttatgataattgcagtttgaaagatagtttttttagtgctcagatttttttcttcattttacacttaaattttagcccaaattctgaattcacacaaaattgataagtttttaatctgactgttctcatgaaaatatggtctcatttgttgccttgttttaatttttttcttcttctatctctactctaaggatggagtagagaaacttgggtctctgggtattctgtgactgacctacctacctacctacctacctaccttccttccctccttcccttcttacctccctctctccctccctccctcctccttcctcctcctcctccttctctccctttctctctctgtctctctctctctctctctctctctcttactcttttatttgttactatatttaagtacactgtagctgtcttcagacctgaagaggatgtcagatcttattacagatggttgcaagttaccatgtggttgctgggctcttaacagctgagccatctctctagccctgtgactttcttatgagttgagtttctaagttatgtagactgatgttcattccatctacaaaattgggggcttctggtttagagtgtcattgagattatatgtggtctatgtttcttcactcatctctttctgaacaactctgttccctttcttgcacagcttgctctgagagcaggcaatgagaaggaagaaggagagacggcagacactgtgggctgctgttcacttagagtggaacacatcaatttacacccagaattggatggtcaggagtatgtggtggaatttgactttcctgggaaggactcaatcagatactataacaaagtcccagttgagaaacgagtaagttcatgtggcctgtgcttctttctctagcttgctctttttacatgtttgtttattcagcaaatattttttgagggcttttgcatgttctgcattttgatgagctctagtaaaattgatctcaaagaaagaaaagagataatatttggtatatggtgtgcctcatttcatgcctgccctgcaacctctgctacattgctgggaacctgtggccatctctggaagcagtttataacagagtctgcagagagttagcctttatagcaaactcaatgttaagattgaacacagccgctttagtgatttaagcatcacagcatctgctgatcacttgttatcttgtggtttttcttagccccagtccaagccccaactgaataaaatggtaatctttcagttctcagtctctgagctcatctctgtagacccatgagatagacataggtacctactactttcgcccattcgataacagtgggtgccagttcaatcgagtaactagggtaagcataggttggctataagggagtgtttttgttcttaggaagtagatgccaggatgtttgatgctaacaaacatcctatttgagttacaatatataccacaaatggctgagaactgatacttaggtatttatgtaaatttacacatgcagaacaagaatttgggtataatatatataggttgtctttctaccttttctcttttttgaaagttattgtgagtttgaaattatttctaaaaaattttaaaataataattggacttgttttaggtttttaaaaacttacaactgtttatggagaacaagcagcctgaggacgatctttttgatcgacttaatgtgagtaaacacaggacactaggctaaagtccaaggcaatctcaagctcctggggtcaagagttgtcaaagggtatttggactgtccattcagtctagattgtccagtgacattctacatatccctcctcccttggggcactcagtcatctgtaaccagcagcagaccctccctcctcccaccctgtgggtggtgctgtggattcctaccaaagctgcaaggcagagggagctgagctttccatggatcttccctcttcctttcatcctttcatgctttcatgagacgcccagctgcctttgctacagacctaaggctttcacttgctttctttactgggagagatatttataagaaagaaaaaatttgttgtcttgaacttaagattaaagtactttatagaaaggcactatgcaatccttcctgtattctggaattattttccctctttgctaacttcctctgtgaaggacaggacagtaactggcaggatggtggcagcactggcacaaggactcctagtattcactgtaagggaaagggtgatttggtgtttacctcagttccaatatcctctttgttgtcgtgtttaatgcagactggtattctaaataaacatcttcaggatctcatggagggcttgactgccaaggtgttccgtacctacaatgcctccatcacactacagcagcagcttaaagagctcacagcccgtaagtaatactctgtatggttgtccttgggatggtgccagtttccttctcttcattctttcccgccaacctcttgaagaggctttgctgtctaagcaaaaccaaggcctttcttcccactgctgctgcaaactctagattaatctcatagaatactaacaagagctttgcatctggtctaaaaatttttatgttttatctgtgttacttacaagctcagagggtataggcagtggtgttaaattggggagaatagagttgtcatggttaccagaaaaatgtagtagtaaatctttttctttttttctttttggtcttcataatagtatgtaataattacctctgggaccttagaacttcttttcctctccatttaaaacaaactctcacactgtagctaaaggctgggcacattcatcatgtgatccaagctagtgaaccttctgcttcagcctacccacagctgaggctgtaggcaacccttctgctcctgccacttgaatttccactgccttctataaatgtatcaaatgctcttagacgagccagagatggtatgctggagatcagtaattaggattggtttaaacagtggctaaaaagcctggatgtgttggtggcagcccagcacttggaagcagaggcaaacaaatctcttgagtttgaagctagcctggtctatagagcaagttcaaggaccctgtcttaaaagaacaccccatccccactcctacccctccacaaaaaagaaagaaagtcagatccctagaactagagtaatagatgaaaccaaacccaggttctctgcatgagcagcaagtattttttaaccactgagccttctctgcagcccctgcagtatagcttaggatcccttcatctcattctcctgtagtcatttcttctagcacagctgcagcatttgctacatctgcctagtaagtgggagacagggaataagaaaagcagtataaaggtctgggggctttgggtttttgttttttgttttggtttgtttgtttgtttaaagatttacttgttttatgtgagtacactgtcactgtcttcagacataccagaagaggatattggattccattacagatgactatgaaccactgtgtggttgctgggaattgcactcacaaccatctggaaagcagtcagtgctcttaacagctgagccatctctccaggcccaactcttgaagtttttaagaaacaaaaccaaaaatatagatttccctgtaatgtagacaagctgggcagtagttatagctattcaggaacttagcagtttagagaccacctggacttcataatgagacctggacacaaaatccagtaagggtaaagaaaaatataaaagagaggctcagaattcctcctgtgacagaaactcattcaggtttatgtagaaatttactgcctttgactcaaatgttgaccttgaaacttggttatgataaactgaaggtttgtaaaaacatctagaatgcatttcatgtgtatattcttggtatacaaactgacccagttactattatatttctttgtagctgatgagaatgtaccagcgaagattctatcttataaccgtgccaatcgagctgttgcaattctttgtaaccaccagagggcgccaccaaagacctttgagaagtcaatgatgaacttgcagtctaaggtatggtgggtccaaaggtagggtagcaaagggagtccatgtctgatgtcttctgacaagcagaggcttctggaatctgacatagtatggcctgggataacagcaggctaatctgggtcggtttagaaagattttttttcaacaaatggaaataatttgatagtatcattgtttttttttcctaaaatatttgtgctggagacacaagttctctatgagccactttctgttttgaagtgctaactttgacataccactgaattgctagttgttgtccttgttatacttagggaaaatggaaatcttcgtggtagaatgcttgccttgtgtgcagcatgctctgggctccatccctagcatgacaaaaataaagtctcggtgatctggctaagaaacatgacagaaagatacacctcagtggcagaacccacctttgcttgtctaccatatgtgaagccctgggcttgatccccaaagcagaagcaggggaagggagaggaatcctgttacattgtttgaagtttaaaagatggtgaagcaatggcatttaattcgctcctaatcctagaacaactatttacatcggttgaggtgtgtcagatatgactgtgtcaggttgtgccctattgggagagactgatacgagaacaagttgttgtttctctctcggcactggctgcttaactatgcatttaaatccacagtgaacatgttaaaacagacacacagggttacaatggaaaacatttaatacacacagtctgtggcttaggaataagtatcctcatttaagatcttgaggtgatcctaacaattataaagtttaagacaatgataataaaagtgacatttccagagttctgcaacactgcaatgcataacaggaaagtattcaccatctgttggcaatagtcacaagacaagttatttctttggattcttgctcacagttaaagaggaaataatgtcaactagagagtagccaaagtacagatgcattttttttttaatccaaatttatagaattctatacttggacaatttacttttagaaactgctttgcaatgaaacttaacacatattttcaggcttagaatattcccctattgagatttctgcaagatgagaacacaggcataatgtatattaatctaaagctacaacctagagattctgatacccctggcctgaaaggatctccagatccacagggagtgaatctcaaatctgcacctaaggtcagcaaaggacgacggtcagcaagctaagaaccccacagactgccttttgagcatgagcctttgctttgccctgttagatggagatcctctgatgctgcttactttcctcatgtgttgtcattccaagcccagaataaataaagtatgagtaccaggtgctatttacacagttcaggagacccttcctggagaatgaggaggtcatttgttgctctcatttgaaaccactgtttgagcagctcgggctgtctgccaaagaagccctccaagtgtaggaaccttctccagtgtgcccacaaagtaaacacacgcccagttgcctagtcagtcaatggagtctttgagagaatttgacatagcttgccagtttagcattcacagaaatggttacgactgtgatttgctgtgtttctagtctaagaagcctctgcctagttgtggctccaatgcttttgtgtgcaaagtcagttctagtacaacatagatagtggaaggaagccactaacagtaaacatttaatgattctctcacaatggtgaattgtttctaatcttgggctgcattttatgtgggtcccctacccccacccccggaagggtagagggtggcaatgggtgtggtgtttttctaacaaattttaggctcagtcaacaacaacccaatgtgtgtaagtcaacatgtattcactctgggatattctcttgacctcataggtcagcagggtgattatggggataggattctttagaatccagcagcacaaactcaccagcattagctacaatatcatcatattgctgtttctaagcaacacccaaagcagaatttaggttttgtgggttcaacaagcaggaaagaatgatggaattattctgtctcttccttgtagatatggattccataagatttcctctgtggagggaaaacttcaattgatgcttattgaatgatgactaattttcttctcactttagactcctttactttctaaaatagtaagccaagttgaagcaattcctcattgatgtctacttgccagtttataatttcctgtgatatcctctttagtatatcctttcccaaagctggcaattctttcccagatttggcaggcttgcttagtagatgtgtgtatctcctctggtagtctcagaaggaatgctaaaggcccagagtggtggcccacgcctataatcccagcatttgaaagtcaaggacaggaagatcactgatcactgagtttaaggccagcttagtctacagagtgagttctagtctcttccttccttcctttttttttttttgaaacagggtttctctgtatagccctggctgtcctggaactcaactctgtataccaggctggcctcaaactcagaaatctgcctgcctctgcctcccaagtgctgggattaaaggtgtgcaccaccggctccagtctctttctaacgaactaactaactcataaacaaacaaaagaatgctaaagtctggcataggattaatttgaaaatagctgtcatctgggtcctcctctgttttctaaagctagtgtgttttcctgaaagagtacaaccagatttccaggttactctacagaaccttatattgttcaccgaagaacgtaaatgagcagcagacagcagctggattgttttctgcagtcactgtccaccattttcataaagcctttttgtactaggaagcactacagctcccagttttacgttctcagatgaagcttctttccctctccaggtcattttattcctaactgcactgccgtttttctctgtctatctagattgatgccaagaaagatcagttagcagatgctcgaagggacctgaaaagtgctaaggctgatgccaaagtcatgaaggatgcaaagaccaagaagtatgtacctgacactgtaccaagggttggataagggagaacagttggcaccatcactcagaggcctgagtgttccagctcacatggtctcattatgtagccttggcttcctaggataaaccaccattctcagctgttttcaaatacttcttgaggaaattttccatgattttctcctttaagcagtatataggatacttgtttgttcttgtccagaggtcagtcttaatgtatgattctgccattcttccagggtagtagagtcaaaaaagaaggctgtacagagactagaagagcagttgatgaagctggaagttcaagccacagatcgagaggagaacaaacaaattgccttggggacctccaaactcaattatctggaccctaggatcacagtggcttggtaagtcttaggcctgtgtagatttcctgcttttggttaaggaaaggcagaaagtctcttggatattgccagctccttcatgccgtgtctaagtttacatttcttccaggagagcctacagctctggttgctgaggtacatggaatatcctaggtgccccatgggcacattagtatagtagcccatgcctgctttcgagatctctgagataaagaatgagctgataaaataaagtcctttgaatatttttgtgcaccagaaagctctggacccctgctatgggttatcattgagctagactaatctcctttgttgtctccatatttattcgtttcttttttctttctttctttctttctttttttttttttacaggtgcaaaaagtggggggtcccaattgagaagatttacaacaaaacccagagggagaagtttgcttgggccattgatatgactgatgaggactacgagttttgaccagtctcggcaggggttctgtgaaaaggaacagtgtggtttggggaagatggataaactgagcctcacttgccctcacacccgagggagaggccacaagtcttaacaaaccaacatctttgcaaaaagatagacctggagatactataagggagagctgagccagttgtcctatggacaacttatttaaaaatatttcagatatcaaaattctagctgtatgatttgttttgaattttgtttttactttcaagagagcaagtggatgggaatttgtcagcatcctgccaggcaaattcagttttgctgcaatgtttggattctctcagctactgtatgtgaagtctgattatattggtgcgtttttacagttagggttttgcaataacttctatattttaatagaaacaaattcctaaactccctcctctcccctatttcaggaatttaaaattaagtagaacaaaacaaaaacccagcgcacctattacagctgtcattctatcgtcatgggaatcagttttcattaaacttgaagcagttgtgacttcggcagtgttttggttcagacacctattcacagaaaagcatgatgggaaaatatttcctgacttgagtgttcctttttaaatgtgaatttttatttcgttttaattattttaaaatatttaagccttcttcttgatcttaaagatcgtgtagcttggggttggggagggatgaagggcgagtgagtctaaggataatgtaataatcagtgactgaaaccattttcccatcatcctttgttctgaccattctttgtaccctttaagagatccatctttttctttggaaaccccagtctttcatttgaaagatgttattgtataaaaacttccacaggtcaataaatttagaggaaaatgagcatttggtccaagaaaaacaaaaaccaaaacaaaacaaaaaaggaaaaataatcaagattttagggcttttattttttcttttgtaattgtgtaaaaaatggaaaaaaaaacataaaaaggaaaattttaatgtgaagactttttttttgctataatcattagttttagaggcattgttagttagtgtgtgtgcagagtccattcccacatctttcctcaagtatcttctatttttatcatgaattcccttttaatcaactgtaggttatttaaaataaactcctacaacttaacggaaacttagcgtctgcctgtttgtgaatgaggccccaggccagagtaaaggctcagggctgagatttagtgcagttcatggtctattcattcaggtcagcaagggtcggtccctcccagtgggaaggtggtatgggcttgtcctgggagtacatctgtcctgatgtgggataaagagtatcagtttccatccctaaagacagccccagaaagcaagggaatgtacaataaacctttaggaactgcctaatcccagtgtgggcagtgcctactgagtgggacagccttgtttatttgagaaacaatcgtagagagctttccatgtgtactgaacagaaacaggatagctagcttatatggagaagcctccagacggaatgaagattctgaattgattgattgaaggacttaactgttaactgtaacaagcccagagctctggataccccaaagtagccatgatccctaccaagtgttccttctgttaccctaagtctgaaattcaaggtgagaaagtgaactccagactaaagggaaggtccgaatgggccaccaattgaagggcccacacctgagcttgctggcatccgcaatctattcagaaccgcctttcttagtggtctgcgttatcactgatgctgggaccacagcagcaaactcttggtcccttgaagcttgaacttcaattggctattgaaggcagcacttactcctgagaataaaaacagtataaccatcactgtttggaaccaagaacattatagccaggtgtttttgaattctgtagtgttagagttagccagacagaatgttaaaacgggaggcctttggtaaccaaccaatactctctggctggtagctggtaagaaatgaaccttagttttaggacctggtaacaaagacaacagcaaatagcaaagtgcattccaggcagtggtggcgggcctcttgaggaaagccacagagcacacatgaatctcagctgatcctgactgggactgagaagaggctgccaagattgggggagctgatgagttttagaggtatataaggcttgcgcttagagaatgggagtaaacctgccatccttgatgacccagcacatctcaattgtagcccattatgcaagagcagaagctaggtgggcagtatctgggaagcccctttctgtgggcaaagggcagtgcttctatgtggcaccaagctacacatcatccacactcttgccatctgtgcagcaagtgcactgtctcttccaaaagctgggacctaacaactgacacatttaaaaagtgaaaagagacacttcacacacacacacacacacacacacacacacacacacacacacacacctcagcctttccagccacaacctctcttcagtttcacaatcaagtaagtacctgcgatgagtcacccactgcactgtcttttcccaccctctgcatccagtgtctaccacaaccctctccctgggttctaaccctggtcaccagtgaccacgcaacaaggagagagtgcagtcttcattcaccatcttgcctaagctctttttgggtggaattgaatgctgttactttacatgccataaatgtaacattttaataaatgatttttagtaactgctgacaagttcatccatcatcatgggtcagttttagatcacttttcatccctcacacccatttgcagctattctgcactcccatatgcatcctccactggtctcaggtttattctctaaacatgtcttatggatgttttatttgaaagagctcatagtatatgtccaccccttgtaaaagtgcctctctggctcctgtaatgtcgcccagtttcactcctatttctgtcaggctgtttgtggctgagacatttttaatgtagctgccatcgtccttctcatttcatgtagccaatgcagtcacactcctgagctctgcacgcacagtcagccacacagttctgcaggatatccacagaaacctctggaggacaactcaggactcgctgttctaagcctgctgggtctgggtttcctgtgtgtgaaaagcacctcactgaaccaggcagactcagcccttggcccttccttccaagctcatatctagtaatttgtcgactttgaaattctttcctaaatacttgtaccacatataggcattttcccaatttttaaaatttcttacatttttttaaaccttttttttttctagaacttttatttcagcccttgcagatccctcctataagacattttcaatttgttcggaacaaaagagcacttcttggagaacatactgccctgaaatgacctcagtcaagctagttttggatgcttatgagtagtcccctgatgacaaatcagtaaacagggagggaggggagatttaacagactttccccacaaccctaaggaagcagcctttttgaaattgccatatagattttttaggttaaataattacgctgtacttacatattttaaaaaatctttcagagaaaatattcctggaaaacagtgctcatcagtgcagaggctggggctagtggtgtaggccagaggcagggcccgtgaccctggggtctgcccataacactataaaaccaccaccaccaaaaccgtcaatgtaatcagttcccaaagttgggtggaggctcactatactaactgtcatgcctgtacttacattggaaaatccttatagccgggcagtggtggcgcacgcctttgatcccagcccttgggaggcagaggcaggcagacctctgagttcgaggccagcctggatgtttaaattaaggcaattatgcttaaattaaaattcccagtgaccgcagatctgccctatatactgtctgggtagaagttacaaggagtatatttttcaaactcaaacttcacacgtaagatgggtgcatcttagggctagagagatgcttaaggggttaagaacacttgttactcttgcagaggattggtgtttggaacctaacaactacatggtggctcacagccaaccaagtaacaattccaggtgatccagtaatctctcctgaccactgtgcaccgggcacacaactggtgtgcatgcgtatacacaggcaaagcactcatacacaaagtaatttttaaaaggtaggtacagcttacgtgtaaattattcttcaataagtctgggctttcagaagcagtggggacgatgtgctttgataacattggatggttctctcatggtgaaaaagacagactcaaggctggagagatggctcagcagataagagtcctgaattcccagcaaccacatggtggctcacaaccacctgtaataatatctgatgccctcttctggtgtgcctcaagacagcaacagtgtactcatctataataaatgaataagtctttaaaaagagaaaaagacagactcaaagattcatgcaaagtttactgataggactgaatgtagggaatcaatatttataaatagtttttaacaatcctattcaaagtatacacgtgccactgaacacatacttggcattttaatcattcatctttaaacctttgtacttcctttgcagaaacactccacaaaataccttggggtgaccttattgtgaaaggaatagttacctcatttggagaggctgtttgtcatgaatacacagcacctctcactttgttctcttcccataatcactaaagaatctagataaggtccttcttgctccctgtgcctttgtcagaccaagcatggcctgtttctgaacaggcttgctgtgttcctgccctgctgagattctctagaaggcacagtagggatgtgtgctggaacaaagggggcgagagtaaaagcaagtccatgctggtctcagtttcccctgtcttcagcaccacatgcttgacctcagtgaaacaagcactgtaccggccgttcctggctgaagagagctaatggtaacagtcagtagtgaggcagccagggctgtggacacaagaggttgttgggaactgttggcatagatgtgagttatggagcttttgttctacaagacagggtttctctgtgtacccttggctatcctggaacttgctctgcagaccaggctggcctcaaactcataaagatctgcctgcctctgcctcccaagtgctgggattaaaggtgtgccaccaccacccagcaggtacgatttttaacttgagtaaaaacaaacaaaacccctaaagttcctttaagggactgagaatgcaactgacttaaggaaaggagcccggaggttatgatgtcagaagggatggggccctagataggtttgcaggtcagaggacaagggcttatactgcaggttcactgaggtgtgcacttaggaagtgcttgctgcatgtacagttaacagcagaggaaataagggacggaacacagcttgatgaatggattaagcagacacttcaagtctaagtctttgtctccctctgtgaacggaacatcactatgctctgacatgatgacttctagagtcaatcattataacgaagaaaagtgtgttagcacttggtactagcctgctaagaatgccctctgttattttaatcacatacatagtcatgtgagaatattttcttataatttaattccaggaaaatgttattccctttccacagaactagttagcaaacattgagagtcactactttagctactatagagctcagccacagctgcctcttaatcgcagcagctccattaccactcaaccatactgtgattgcccttataatcacatctcccatttcaaccacacagcatttttgtccttttctgttttaagtgccctctatttttcctaaagagcttggtgcagtggtgcccactggatgtctcaattcttgggaggctggggaggcctcaagtttaaggccagcctgggttctacaagcaagaccatacctgaagaaaaatgcagtgaacatagcagcgtacctgcttcctgttcaaggaaagacttgtcatcacttctggaagaagtgtaaatagaaatccatctgccagtccgtcagctcacaaagagccaggaggctgaggatgaacgttttgcagaacaatgaacatccattccaggatagcactgcacaacacagttccctggaagttgtctgaggctgttcgcactcccatctccttcctgttgcttccacaatgctgaccttagggctgctccctaaaaagtattctacccactaacctatcagagacagcaccctaaaacaaattccgacctagccgggaagcacagtagctcacatttttaatcccagcaaggctgagttgctgagtcaggagaatagctaaactcaagatgagcctggatttgtacaaacttgtacaaaataactaannnnnnnnnnnnnnnnnnnnnnnnnnnnnnnnnnnnnnnnnnnnnnnnnnnnnatctctaggacccacatggtaactgtaaataaagaagctcacttaggatacccaagatataagatacaatttgctaaacgcatgaaattcaagaagaacgaagaccaaagtgtggacactttgccccttcttagaaatgggaacaaaacactcatggaaggagttacagagacaaaatttggagctgcgacgaaaggatggaccatctagtgattgccatatgcagggacccatcccataatcagcttccaaacgttgacaccattgcatacactagcaagattttgctgaaaggacccagatatagctgtctcttgtgagactatgccggggcctagcaaacacagaagtggatgatcacagtcagctattggatggatcacacggcccccaatggaggagctagagaaagtacccaaggagctaaagggatctgcaaccctataggtggaacaacaatatgaactaaccagtaccccggagctcttgtctctagctgcatatgtatcaaaagatggcctagtcagccatcactgcaaagagaggcccattggacttgcaaactttatatgccccagtacaggggaaccccagggccaaaaagggggagtgggtgtgtaggggattggggggtgggtatgggggacttttgggatagcattgaaaatgtaaacgaggaaaatacctaataaaaaataaattaaaaaaaagaagaagctcacaatatgcttaccactgttctaagtagttattaaacgcaatatgagatcaggcccacaggccagaggggcagctgggcagtctttccttgactccaggaacaggcttggtataagctaaggttgaagcatgagtgttgcctgaaataagccccaatctgggctagtcggggtgacgtcacaggcaagtgccttgtgtgggggctagagcacctcccagacagcacaaatgtatatacattaccagtgacacctacacatccttatatatgctgagctgggggaagcccatactggctacaccctgtgtgtgccctacttttcccaaacttccttgggtagaaggagacacctaaggcctaggaagctaggaagaggaaatgaggccctgtttcccaattataggcctggcaaacaaattgctgttggaagaaaatcatggagcccctgggggtgggggtggggtcttgttacagacacaaaagcaaaaaaggtttgggctgaacacaaggaagctcccagaaaatagaattttaaagcatactgtagcctctaggctgctggagttggcacagaaagctcaacaacgattacaacattttaagagggtgtctcctgagagaaccggccagaccaggcaggcagggaaaggccctgttcagctccatctgccctctctgtctaatcatcctggctggccattcccctccactgagtaaaaaccccagggcctttgcacatgctgttattcatacctggaaagtactttcctccagccttcccttcaaaatacatatgtccatctctttacaccatttggcctctcttgaagtcctacagacataagacacagctcctcttacttaatgattggccagctagccaatggccaccaggattacctctcacccagtgggctctcttgtggaacacagacactcagcttcccacttattacatagcctgacttcaagtcacggggctctgaaaccttgattagaagataattaggatcatgagttgtgcaagccaacctcaagtccagtttccgcctacatcagaggcctgtcactaggtggcagtcagtctatctcaactccccagtccctcaggacaaagttcctcagtggtatacagaattcggacgttcttgagaccaccctcaagggaaatagcgcatctgtcactatttgcctggcaaagcgaaggtggcccaggtgggtgggttgtccaaacccatacatcacaaattctagtctcaggaatcccaggggagctttcctgcaaggggatgttgtgtgggacttctcacctctgaaatgcagatgctgtccagagctgcagggtagctgtccaactaactgtctgctcatcattggccagacggcaggatcaagggatgccctcgggtttacccgtgctgttcagagaacggcttttggaagattgattttaagttatttaacagtcacagacaggtgtcatgtctggagaatagaggcaaagtccgcggtgagggatgaagcaggagagataggggaaggcaagacaggactgctgggccacgaagctgtgctgatttgaagcacagtgggaattcacgtacgcaatttcaaaggctttagtggtaaattctgaagctcagatgcaggcaagacccaagaggatagtgtacacagagagaagaggggtcctcaggatcgtgcgtagagtggagagagccccaaaggcaggagggaagagcctcagtggattacttagggatgagggagagaagaaaaaaggttcttgcaaggtgtggggtcttccaaattcaggagttcactgccatatagagaaggtgtagcgggtgaaaggggccatgtgatgaggatggcaagcaaggctgtggcgcagatgacgagatgcctgggtcgggaggtcaggggagacccaggattggggtcacctgtgtctgcgcagaggggaagccaccctgcaactggcccagcactgagtccagaggaaaatgaggcagaggacaaaccagagcttcggagactaagtgcaggtagggcgcgggcggagcgtgaggagggcagcggaccacgcgagaggcctcgaaggccaccggacccgcgtccgagagtctgagggccctgcccacacctgcgtggccccctccccagaggccacactccaaggccaccctagaacccgtctgtctgctcaagcccttgcaaaagacgtctgcgcagagggggcgtggcaggcgtgctgtcactcacggcctgttagccaatccacgagtgcgcccctccccggagagggtgcgcggagggcccgcccccgccgccaccgcgggtgtgaggaggccaggctggcgcggctccctccgcccggcagccttgccaggtaaccgggttcggcgggagggctgggggtcgcgcagccccctcgctccctgggaggcgtgcacactgccgcggcgggtcccgtgtgggccggaggcccgtgcnnnnnnnnnnnnnnnnnnnnnnnnnnnnnnnnnnnnnnnnnnnnnnnnnnnnnnnnnnnnnnnnnnnnnnnnnnnnnnnnnnnnnnnnnnnnnnnnnnnnnnnnnnnnnnnnnnnnnnnnnnnnnnnnnnnnnnnnnnnnnnnnnnnnnnnnnnnnnnnnnnnnnnnnnnnnnnnnnnnnnnnnnnnnnnnnnnnnnnnnnnnnnnnnnnnnnnnnnnnnnnnnnnnnnnnnnnnnnnnnnnnnnnnnnnnnnnnnnnnnnnnnnnnnnnnnnnnnnnnnnnnnnnnnnnnnnnnnnnnnnnnnnnnnnnnnnnnnnnnnnnnnnnnnnnnnnnnnnnnnnnnnnnnnnnnnnnnnnnnnnnnnnnnnnnnnnnnnnnnnnnnnnnnnnnnnnnnnnnnnnnnnnnnnnnnnnnnnnnnnnnnnnnnnnnnnnnnnnnnnnnnnnnnnnnnnnnnnnnnnnnnnnnnnnnnnnnnnnnnnnnnnnnnnnnnnnnnnnnnnnnnnnnnnnnnnnnnnnnnnnnnnnnnnnnnnnnnnnnnnnnnnnnnnnnnnnnnnnnnnnnnnnnnnnnnnnnnnnnnnnnnnnnnnnnnnnnnnnnnnnnnnnnnnnnnnnnnnnnnnnnnnnnnnnnnnnnnnnnnnnnnnnnnnnnnnnnnnnnnnnnnnnnnnnnnnnnncctcgcgcctgcccgcctcccaaacacttgggcaaactttcgggcctcgcgcctggcgccccgtctccgcccagtccctggtggtcactctggggcgggtggaggggggcatccgggtcttggatcacctgataggacaccccctcccccagtagggggggagtgttccaggcactttgccctgaggcctaagagtcctcactggttggacaagtggagtgggattccggcccttagcatcgggcggctgtcagtggctgtgaggggaagccaagacagggaccccctcatccaacctgagaacctggggaaccgacaagatcttcctgcccactgccatttctccagagtgtgctgtctgtgaaaactcctaagagctccgggatgggcttattggcgcaagaacctttggaatcctcatgtagaacttaggcagatgttggggtagggctggttgtggagcagagcgggcctactcatctccctcttctttgggaggatggggtatgaaagctaaaaccgtgactgcttccccctccccatgtcccgtggatggttttttttttttttttttttttgccccagatctgaattttggaggtcca

SEQ ID NO: 182 - DNA, 3458 bp, Mus musculus
atgagtggggaccatctccacaacgattcccagatcgaagcggatttccgattgaatgattctcacaaacacaaagataaacacaaagatcgagaacaccggcataaggagcacaagaaggataaggataaggaccgggaaaagtctaagcatagcaacagtgaacataaagattctgaaaagaaacacaaagagaaagagaaaaccaaacacaaagatggcagctcagaaaaacataaagacaaacataaagacagagacaaggaaagaccgaaggaggaaaagattagagctgctggggatgcaaaaataaagaaggaaaaggaaaatggcttctctagtccgccacgaattaaagatgaacctgaggatgatggctattttgttcctccaaaagaggatattaagccattgaagaggcttcgagatgaagatgatgctgattataaacctaagaaaattaagacagaagatatcaaggagaagaaaagaaaactagaagaggaagaggatggtaaattaaaaaagcccaagaataaagataaagataaaaaagttgctgagccagataataagaaaaagaagccgaaaaaggaagaggaacagaagtggaaatggtgggaagaagaacgttatccagaaggcatcaaatggaaattcctagagcataaagggcctgtcttcgctccaccatatgagcctctgccagagagtgtcaagttttactatgatggtaaagttatgaagctgagtcctaaagcagaagaagtagctacattctttgcaaaaatgcttgaccacgaatatactactaaggaaatattctggaaaaatttctttaaagattggagaaaggaaatgactaatgacgaaaaaaatacgattaccaacctaagcaaatgcgactttacacagatgagccagtatttcaaagcgcagtcagaagctcggaaacagatgagcaaggaagaaaaattgaaaatcaaagaagaaaatgaaaagttattgaaagaatacggattttgtgtaatggataatcatagagagcggattgccaacttcaagatagagcctccggggcttttccgaggccgagggaaccaccccaagatgggtatgctgaagagaaggatcatgcctgaggacatcatcatcaactgtagcaaagacgcaaaggttccttctccccctcctggtcataaatggaaagaagtccgacatgataacaaggttacttggctggtctcctggacagagaatatccaaggttctatcaaatatatcatgctgaatcccagttcacgaatcaagggtgagaaagactggcagaagtatgagactgcgcggcgtctgaagaagtgtgtggacaagatccgaaatcagtatcgggaagactggaagtccaaagagatgaaggttcgtcagagagctgtagcactgtacttcattgataagcttgctctgagagcaggcaatgagaaggaagaaggagagacggcagacactgtgggctgctgttcacttagagtggaacacatcaatttacacccagaattggatgttcaggagtatgtggtggaatttgactttccttggaaggactcaatcagatactataacaaagtcccagttgagaaacgagtttttaaaaacttacaactgtttatggagaacaagcagcctgaggacgatctttttgatcgacttaatactggtattctaaataaacatcttcaggatctcatggagggcttgactgcgaaggtgttccgtacctacaatgcctccatcacactacagcagcagcttaaagagctcacagcccctgatgagaatgtaccagcgaagattctatcttataaccgtgccaatcgagctgttgcaattctttgtaaccaccagagggcgccaccaaagacctttgagaagtcaatgatgaacttgcagtctaagattgatgccaagaaagatcagttagcagatgctcgaagggacctgaaaagtgctaaggctgatgccaaagtcatgaaggatgcaaagaccaagaaggtagtagagtcaaaaaagaaggctgtacagagactagaagagcagttgatgaagctggaagttcaagccacagatcgagaggagaacaaacaaattgccttggggacctccaaactcaattatctggaccctaggatcacagtggcttggtgcaaaaagtggggggtcccaattgagaagatttacaacaaaacccagagggagaagtttgcttgggccattgatatgacttatgaggactacgagttttgaccagtctcggcaggggttctgtgaaaaggaacagtgtggtttggggaagatggataaactgagcctcacttgccctcacacccgagggagaggccacaagtcttaacaaaccaacatctttgcaaaaagatagacctggagatactataagggagagctgagccagttgtcctatggacaacttatttaaaaatatttcagatatcaaaattctagctgtatgatttgttttgaattttgtttttactttcaagagagcaagtggatgggaatttgtcagcatcctgccaggcaaattcagttttgctgcaatgtttggattctctcagctactgatatgtgaagtctgattatattggtgcgtttttacagttagggttttgcaataacttctatattttaatagaaacaaattcctaaactccctcctctcccctatttcaggaatttaaaattaagtagaacaaaacaaaaacccagcgcacctattacagctgtcattctatcgttatgggaatcagttttcattaaacttgaagcagttgtgacattggcagtgttttggttcagacacctattcacagaaaagcatgatgggaaaatatttcctgacttgagtgttcctttttaaatgtgaatttttatttcgttttaattattttaaaatatttaagccttcttcttgatcttaaagatcgtgtagcttggggttggggagggatgaagggcgagtgagtctaaggataatgtaataatcagtgactgaaaccattttcccatcatcctttgttctgaccattctttgtaccctttaagagatccatcttttctttggaaaccccagtctttcatttgaaagatgttattgtataaaaacttccacaggtcaataaatttagaggaaaatgagcatttggtccaagaaaaacaaaaaccaaaacaaaacaaaaaaggaaaaataatcaagattttagggcttttattttttcttttgtaattgtgtaaaaaatggaaaaaaaaacataaaaaggaaaattttaatgtgaagactttttttttgctataatcattagttttagaggcattgttagttagtgtgtgtgcagagtccattcccacatctttcctcaagtatcttctatttttatcatgaattc

SEQ ID NO: 183 - DNA, 2301 bp, Mus musculus
atgagtggggaccatctccacaacgattcccagatcgaagcggatttccgattgaatgattctcacaaacacaaagataaacacaaagatcgagaacaccggcataaggagcacaagaaggataaggataaggaccgggaaaagtctaagcatagcaacagtgaacataaagattctgaaaagaaacacaaagagaaagagaaaaccaaacacaaagatggcagctcagaaaaacataaagacaaacataaagacagagacaaggaaagaccgaaggaggaaaagattagagctgctggggatgcaaaaataaagaaggaaaaggaaaatggcttctctagtccgccacgaattaaagatgaacctgaggatgatggctattttgttcctccaaaagaggatattaagccattgaagaggcttcgagatgaagatgatgctgattataaacctaagaaaattaagacagaagatatcaaggagaagaaaagaaaactagaagaggaagaggatggtaaattaaaaaagcccaagaataaagataaagataaaaaagttgctgagccagataataagaaaaagaagccgaaaaaggaagaggaacagaagtggaaatggtgggaagaagaacgttatccagaaggcatcaaatggaaattcctagagcataaagggcctgtcttcgctccaccatatgagcctctgccagagagtgtcaagttttactatgatggtaaagttatgaagctgagtcctaaagcagaagaagtagctacattctttgcaaaaatgcttgaccacgaatatactactaaggaaatattctggaaaaatttctttaaagattggagaaaggaaatgactaatgacgaaaaaaatacgattaccaacctaagcaaatgcgactttacacagatgagccagtatttcaaagcgcagtcagaagctcggaaacagatgagcaaggaagaaaaattgaaaatcaaagaagaaaatgaaaagttattgaaagaatacggattttgtgtaatggataatcatagagagcggattgccaacttcaagatagagcctccggggcttttccgaggccgagggaaccaccccaagatgggtatgctgaagagaaggatcatgcctgaggacatcatcatcaactgtagcaaagacgcaaaggttccttctccccctcctggtcataaatggaaagaagtccgacatgataacaaggttacttggctggtctcctggacagagaatatccaaggttctatcaaatatatcatgctgaatcccagttcacgaatcaagggtgagaaagactggcagaagtatgagactgcgcggcgtctgaagaagtgtgtggacaagatccgaaatcagtatcgggaagactggaagtccaaagagatgaaggttcgtcagagagctgtagcactgtacttcattgataagcttgctctgagagcaggcaatgagaaggaagaaggagagacggcagacactgtgggctgctgttcacttagagtggaacacatcaatttacacccagaattggatgttcaggagtatgtggtggaatttgactttccttggaaggactcaatcagatactataacaaagtcccagttgagaaacgagtttttaaaaacttacaactgtttatggagaacaagcagcctgaggacgatctttttgatcgacttaatactggtattctaaataaacatcttcaggatctcatggagggcttgactgcgaaggtgttccgtacctacaatgcctccatcacactacagcagcagcttaaagagctcacagcccctgatgagaatgtaccagcgaagattctatcttataaccgtgccaatcgagctgttgcaattctttgtaaccaccagagggcgccaccaaagacctttgagaagtcaatgatgaacttgcagtctaagattgatgccaagaaagatcagttagcagatgctcgaagggacctgaaaagtgctaaggctgatgccaaagtcatgaaggatgcaaagaccaagaaggtagtagagtcaaaaaagaaggctgtacagagactagaagagcagttgatgaagctggaagttcaagccacagatcgagaggagaacaaacaaattgccttggggacctccaaactcaattatctggaccctaggatcacagtggcttggtgcaaaaagtggggggtcccaattgagaagatttacaacaaaacccagagggagaagtttgcttgggccattgatatgacttatgaggactacgagttttga

SEQ ID NO: 184 - DNA, 96592 bp, Homo sapiens
ttcaaactcctgggctcaggtaatccccgcacttcagtctcctgcctagctaggactacatgtgcatactcccatgcctgactaatttgaaaaacatttttgcggggagagatgaggtcttgctatcttgccttgtctggtcttgaactcctgggctcaagcaatccttccaccttggtctcccaaagcattgagattacaggtgtgagccaccatgcccagccaagcctcaagtcttgaatactttaaatccattttctttcttttttttttttttttgacagcgtcttgctctgttgcccaggctggagtgcaatggtgcaatctcagctcactgcaacctctgcctcccaggtttaagcaattataggtgtgtgccaccacacccagctaatttatgtgtgtgtgtgtgtgtgtgtgtgtgtgtgtgtgtgtgtgtgtatttttagtagagacgggatttcgccaagttgcccaggctggtttcacactcctgagctcaggcaatctgcccacctcagcctcccaaggtgctaggattacaggcatgagccaccatgcctggcctgtaggtaatattttctaaaacacatattatgttcctccattgctcatagcaactctcagtgacttcccagtgctatgaagataaactgcaaatgccttagagaccctgcatgaactgggccttgcttacctctccagcttcatctctcactactcctcttcaccctctaccccttagccatactgaattaccagcagttccccacataaaccctgctctttccagtttccaaatttttgcccatctgttctcttggccttgagtgcttgtctccctcacttgccttctttattctccccaacctttacctggctgacttctgtttccattttgagacctaagtttaagtgccatttccactggaaatccgtgcctgactctgtaattctggatggcagttcttctaaagggctcctaccgcaaacacactgtactttatcctcgaggcactcatcacagtaagtgacaattacttgttcccttctctgtctcacccaccagacctgagctccttgagagcaggggccttgtctttctagttcacggctgaattcctaatactagcttagtacctggcttatagttgattgtgtgtgtgtgtgtgtgtgtgtgtgtgtgtgtgtgtgtgtgtgtgatgcagggaagccaaagaagggtcaggatgcaatgataacctggggaaggagggacaattacaaaggaaagtcttgggcagattccatacaggtagtagccaccaatgggatgtggaggacaggatcaagggttaactcaagaggcttcaaggttctgagcctgagtgactgggaggaatagagctattcactaagcagagaccatagaagcgaagggcagtttcaggagaaaagctgaacccaggaccaaagggctgtgggggtcatcaagtggacacatgaaataggcatatgggtaaatatttctatggttctaaaaaggagtcaaggctggagacattcatttaagaagctacctggccaggcacggtggctcacgcctgtaatctcagcactttgggaagccaaggtgggcagatcatttgaggtcaggagtttgagaccagcctggccaacatggtaaaatctcgtctctactaaaaatataaaaattagccaggtgtggtggtgggcacctgtaatcccagctactcgggaggctgaggcaggagaattacttgaacctgggaggtgaggttgcagtgagctgagatcacaccactgcactccagcctgggcaacagagtgagactccgtctcaagataaaaacaaggctaccaagatgggggcatatagagagaagacaagtgtgatgatataatcttggggatccattaaattgtgctgaaagaagagagggagagagaaatggtatttggacaggtaagaaaaaagccaggagaattaatggtcattggatccaaatgcaaaggacctcaaagaatgtgctcatccacctcattgagtgttgcaggaaggtggagaagaataggctactctacttggaaactaggaagtccctgattagaatagaagccagaccaacagtgttaaaggaatgaaaaataaagcagaaaaggcagcacatgtagactgtcctttctgaatctttcaaacacaggtgagggcaacagtgacctaaggacaacttgggaagcaggttaggggttctaagactgggctccatacacacactgcttaagttcaaatcatagccccaacactcaatagctgtgtgactttgggcaagttaacttacttaactttcctaagtctcagtttccttgtctaaaacggtgggacaagtagcccctgtttcatatggttattgcaatgattatatgaaaatgtatgtgaagcactcagcacagggcagagacgtggtaagcaaccaattaacgtgagacatgaattttaacagggtcaaggaggaaaactgggaggaggagaagttgccatgcaggagggagagaagatgctcgggtgaactaggctttgaggaggtggaagggaggggactgaggacttggagggcttgtggagagggaggatggggaagtaggccttttcaaaacccaactttggctaaaggatcacctgctggttactgaatgaagcagctacttctgttccattttcttggggagtcatgctgaggcatctctaggagcttctctcactcctagaatcttccagtgtttcctggagcctggtctctgcctctatgcctcccactgcctgctggttctctagctggaggcagctggactcaggcagccgcaggatgtcccagcagcacacattgggagagggggattcagagagagctgcttcacaacttctctttgggctatacccttgacacaggccaaatccttctgtccccgtcacaggtacagatactttctatcttcaggtattccaaatgatcttccatgattaaggttgcttctgaaacacaatggtctccctggacctccgagctaatctgcctatttccagtgtcagttccaccaaactgttccccctctgctgcctgtgattgttctcatacctgtttaaaaccctgtcataattcaccttgcagtatctccaccagaactgggagggcctctcccacctgcccagcctacattggttatatcttcacttttaccctctgctccatcctgaccaaagctatggctctgcatatattgcctctcttcttgcaatatcttttcttctcttccacgggctagcaacccctcatctttcaagaatagtgtccaactagaaacctttcctaatattgcccccaccaccactggtgagttggatgtgctcctttactcaagagttcccacagcaactggtggctggcctcctcttccctattattccttataccttagtgttacagctggagaatacctctgtctcattatcagactaggcactcttccaaaatgaggattaggtcttataaatagctgtatctctagggcttagtataggacctaccaacctcaaataggtaagtagtacctatttgccttcattcctcagggaatactggttgaatgaataaatgtcctcatttaggatgtattctggcaggaagacaatggagatgcaagtggactacttttcttgccccaagccacatggccaggatcctacatctttgttgcttgactgcctctcatttcataattcaagagttgccagctttcttattgatactgaccttttttttttttttttttgagatggagtttccctctcgttgcccaggctggagtgcaatggcgcaatctcggctcactgcaacctccacctcccaggttcaagcaattctcctgcctcagcctccctagtagctgggattacaggcgtgcagcaccacgcctggctaattttgtggttttagtagagaggggtttctccatgttggtcaggctggtctcgaactcccgacctcaggtgatcctcccgccttggcctcccaaagtgctgggattacaggcgtgagccactgcgcccggcctgattctgacctttttattccacacatctcaactgttgctgagctgtttcattctaggaggcaaagagcttttctggttgttcctgagatcaccagcctgaatctcctttcttgagcacccagcagtttcttttccaagggtatcggaatcttgaaagggcagcagattcttaggcatgggcggggagagctgctagaagacatcactgtcaaagaattggcaaagtcaagaatgtgccagcatccaagggtcaaaacgtcaggtgggacatcctgttccacagcatgatagccccagagggggtgccaaaaggatgacaaaagccttgtgagtgcccaggaatcaagtagagattaggaccaacccatcagagtgcaattaagcaaaagggggaatcaatttaaaggtgccagaacaggaaccatgcaaccaggcttcaggagaaagtaggaacgagggtcctgaacttcattcatcagggtcctctctctctcttttttaagacaaggtgacactctgtcacccaggctggagtgcagtggcacgatcttggctcattgctgcctcagcctctcaggtgttcctcacctcagcctccctagtagctgagactgcaggcacacaccactatgcccagctaatttttgtttgtagagacagcattttgccatgttgcataggctgacttcaaactcctaggctcaaatgatccagccgcctcaggctcccaaagtgttaggcttacaggtgtgagccatctggcgggagggacttctatctcttatctcttctcttcctccacccactttctcctatatcctcccccacttccaggtttctctggcccttccaacagcaagtatcgccaggagcagctccctaatctacatactacagatctatccacaagaagacagatggaaccactcttttcttctgaattctagaaccttaaggaagttaacctgagtggctcagcttggatcaagtgcccatcctggtccaaacaactgtagcagcacatctgtgtatttgtgtatcttgttcctccataatcttgcagtccggggaaagtgtgcagatggatgggtccctgaaaagcaagagttgtttagacaacgctagaggtgttcagttctgggagacaagagttgggccaggttgataactagcctaagagagtcggaatcagatgaataagaactagatcttgggtgacaacctagatcaagagtcttgaggttcagtcatttcaaaaagctcaagtctcattgcttcttggccttctggctaagatcatgtgcagtatctgttcttaccagtttaatatctgatacatcctctatctgaggataatataataaatagatttttggagcaaggagatggaataggagcttgttctgtccactctacacattggcctggattgcagtacctccaggaatggtgcaccctctctaccacccccaaaaagcccaagtctcaagaggtagtctggaaaaaagtgtttttggatttacctacatttttttttccaagatggagtctcgctctgtcacccaggctggagtgcagtggcgccatcttggctcactgtaacctctgcctccaggattcaagcagttctcctgcctcagtctcccaagtagctgggattacaggtgtgtgccaaccatgctcagctaatttttctatttttagtagagacagggtttcaccatgttggccaggcaggtctcaaagtcctgacctcaggtgatctgcctgccttggcctcccgaagtgctaagattacaggcgtgagccactgcgcccggcctaatttttgtaattttagtagagacgagttttcaccatgttgaccaggctggtctcgaactcctgacctcaggtgatccacccccgccctcggcctcccaaagtgctggcactacaggcatgagccaccgctcctggccgggtttgcctacattttggagatgctgcacaccatgtccctcttttcaagagtcacgtaagtatttacatatggaagaccctgagaaggcacctgggaaaaaacctgtttaactgtaaatataataatgtatgtatttgtatgtggagctcttcttttagtggattatctataaaccgtccactgttcccaatgcatactttggagacagacctacactaccagttttcacctgctagttatttttataagggttgggatggtccatgagtgaacagtcttgatttaaagcagtgtttcccaaacctcatttatttgcctatagccttcctggagtttgtcttatatgtccgctctgtgcactattcctatatgtttttatgtaaatcaatcacttttttaaaaagcctcatcccagttatatccttaaaacaatggttattttttctcatacacatcgaaatacatatctattagaattaaaatgcttgtccatgcactatcaataatctcctcaagtaccatatggtggggacatgtgtttgaagtgttaggagtcaggagtggtctctgtaagacagagtaagtcagtcaacctctgagcactgccagccacacatgctggcagagaagttcagcctgtgacaagactgcccggatatttccatgtctgtgcacggggatgtcctcggtctgccattgtgaagtctgtgctgttttcatgcctacctagtcttctttggaggggcctggaaagcaaatgcaggctgggtacagtggctcatgcctgtaatcccagcactttgggaggcaaaggtgggcagatcacgaggtcaggagtttgagaccagcctgaccaacatagtgaaaccttgtctctactaaaattgcaaaaattagctgggtgtggtggtacgtggctgtaatcccagctacccgggaggctgaggcaggataattgcttgaacccaggaggcggaggttgcagtaagcccagatggcaccactgcactccagcctgggtgacagagactccatctcaaaaaaaaaaaaaaaaagaaaaaaaagcaaatgcagattctccctgggaaacggggggttgggagagtggagtagtgtggatgcattgttattcctgaaggccgtcctcaaattatcttggactcactgcagcaagcagatgcctcatcttctggccagggattgatcctgagatgggaagagtatgagaagagacaccaacagcaaggcaaaactggctctggcagcttgcttcagagaaagagtatagctttggagtcaggccgacctgagtatgaatccaagactcagcacttactaggtgcctgccctcaaaccattattttttgatagtcattacatacccacaatgatcaccatggagtggatgaggaaacagggactcagagaagttaaacaacttgcctgatatcacacaggtaacaaacagcagagcagaattcaaacctaagttgatttgacttccaaatgtgtgctcctaaccaaagcagggtaacctgctttgatttgcccatttcttgagcacctcttctgtaggagggcctgttgctgggtgctgggaattcagtggtaggcaagatggacaagattcccccctctcacagaccttgcttgctataggggaaatagacaggaaaccaattactacatttgtaacttaataacaagtgtcataagtgttacaaaggagatagatactataaggcaccttttatttttatttgtttatttattttttgagactcactcgctctgttgcccaggctggggtacagtggtgcggtctcggctcactgcaacctctgcctcccaggttcaagcgattctcctgcctcagcctcccgagtagctgggattacaggtgtgaaccaccacactctgctaatttttgtatttttagtagagacagggtttcaccatgttggccaggctgttgttgaactcctgacctcaagtgattgatccacattgacctcccaaagtgctgtgattacaggcgttagccaccgcgcctggcctataaggcacccttggtcagccagtggaagcagggtcagtagtgcgccggagagtcactttgaaaaagtgatatttaggttgatcttgaagcattcacaagatgtggtaaacacatctaatggtaaacatgtgatggtaaacattagatgtgataaagatactgatggtccactggatgaacagttttcatatttacttccaaatgatttcatagatattatttcacagataacacttaggatgaaggtaaataaaaaggagatcaattaaaatatgaaataataatagtgaaagtggtaatagatgtggcaatatccacaaaggagtaatggttagattagcatattgagaagatcactttggcaattgttggaatgcagtttacgagagggccaagaatggaagcagcaatccctgttagaagtgtagtgttttggagtgcggtgttttttgttggtttgttttttgttttttttaaaccaggtctcactctgttgcccaggctggagtgcagtgcagcctcgacctcctcctcgggctcaggtgatcctcccacctcagcctcccgagtagccgggactacaggcacatgccaccacaccccgccagtttttgtatttttttgtagagtcagggttctgccatgttgcccaggctggtcttgaactcctgggttcaagtgatctgccagcctcggcctcccaaagtgctaagattacaagtgtgagacaccacccccagccagcacattgtattaatccaagcaggagaacgcagacttcaaaggcttatgggcagcagagagaagtagatgaagcaaagagatgcaatcagcgggactagtgggaaatgagggaaaggaaggtgtcaggatggggctttttctagctgagtggagttcagttcattcccagagaagcttgagaggtatccaactatagatgcaaggtagctggctgttggtcccttgtctttaggacagtttgacttttgtaatacaggcgacctcacagagctattgtgagaattcagagctgggcacagaatagatgctctataaacggtagttctattccccatttgccccgtcctcccagcatgccagggatacaggggcggatagagacaggttcagttccctttggtctcttgcattcccccttccctcagcacaattcctgggctcatagcggatgctcaataagtatttgtagaatgaaccaaagaaatcagacccttggtgacccagggctacatgtactcggcggaaaactggggttaaaccggacccttggttggttgaaaaattaaaataatttttaaaaagtgggcgtgaaataatccagaagttggagggcctggacaaaggctggggaggggactcctcccaccaggcggcctcagggtcggcttagcaagaaaggaggcgctggggagacctctggggtcccagctgccaaggtactcgccgctccaaggagatgcggacgccggataccagctctgcccaagattgctgggtcccgccgcggcctttaaaggcccaccacgtggctgcgcggccagccctggtccggaggcggtgcccgggtggcgcctgcgcactgcctagcagaggggctggggttccgagaaaaagcgtctggagaggaaggggaggctgcttggggtgggacgccgtgggaggagtcggctccttatgcaaatcacagcggagcgcgcacggtccggaggcggggcttgcgatgcaaagacaggtccgtctggcgaacagcgagggggcgggccgcaaccctctgcctctttccgcgagcgctgacgtcgccgacgtgttgtttaaaagcggccgcgcaggcgcagtgagcccaaatgcgaacttaggctgttacacaactgctggggtctgttctcgccgcccgcccggcagtcaggcagcgtcgccgccgtggtagcagcctcagccgtttctggagtctcgggcccacagtcaccgccgcttacctgcgcctcctcgagcctccggagtccccgtccgcccgcacaggccggttcgccgtctgcgtctcccccacgccgcctcgcctgccgccgcgctcgtccctccgggccgacatgagtggggaccacctccacaacgattcccaggtacggcccggcctgaccctggcggccccggaccccggcctggccgtcccgcgacccccggcgcaggccccgaccccagccccggcccggcagctttgacaggccggagcccccggtgaggggccgcctgccggagtagatcggctcgctaggccgcgagcgagggccgcgaagttacagttcgaggcagggatggctgccctctgtggccacccccgggtccccgtcctccccgggggcgcagggtgagccagaccccggccgcgcgcgctcgccgccggaggggttaaagtggctgttgtttgatattctctccttttctttttccagatcgaagcggatttccgattgaatggtgagtgtgccccctgcgccgactccggggccccccagccgccggccgcctcccccgcgccctgccggtgccgggcagaggacagacatggcgtcccagagactaagtcccggctcctcgctcaccggccccattgttcccatcgggccgcctcttgaccccctttccggggaccccagctcctccagatcccggccctcccaagaggggacaacggagaccccgtgtcgtccgccaccgggcctcgggcggtctttccgggccgggattcctcccgggaaagtcgccttgtcgacggtcgggacttagtctctgcgccattttctttttctctctcctctcctttctgtgcctgtgtctctttctctccctccctcggctctttccttgagctgcccagaatgagctttctgcagagcaaagccgtataaatcacatacttcaccagagagggaaggctgggggactgaattattattttttaaactttattttgggggttattccctttatgcttcatgtttgtttccttttctgcttccagaatgaaagatttccttaagcaactgttaattttttttttgataggctgtttatgataggaattatggctctaaaactaaagccacgctttgtggagttctttatatttccaggttgtttttcccaagttacgttctttgcaaaggtagcagtacctccctaaagaaagtttgcaagttctctgtgggtcacccaatgtaaatgttggatttttaaaaaattatgttagtcactggaacttttcattgtggtcgaggttcccaatgcagtgtttttctggaaacgcagtttagtgtacttgttggaaggaaagattgttgagcatctcttgtggacctggtgtgttggccttttcgtttgggttgtaaggaggaaaaaaagattttatttattgaagcaaagagtgtccagtacccacccctgcttcctgttcattctttttcacgagccactgtttttcaggaatcaagaactggctttttttttttttcccaattctttatgtttttgaacccttttcagccaaatcaaggcatttattcttactgtatttccacttcagttacccagggaagagtcctccaataaaaagctcatccttgcaggctttcgaacaaccctgttgaaggagaagttaccttctgtagtgtgctgggaattcccactgattttgatggtacataatcctgctcaattgagtttgggttccgggaacctctccaatgggagaagttgatgagtaggttttctaatgttgtaatcagcagtccatcatgttagcctgctctactgagagcaaccttatgttcagagtttgaagtggggcatccagcaggagatggtactcagccaggagagaatctggtttaaagtatggcatttcttgagcaccagatatgtgccaaccactgtgcttggtgctagagctgatcctgtaaccataacactcccttgctctcaattcagtctattgggggagacataattagttaattataaggtaactactggggcatatgtgtacccaaaatgctttgaagtataggggagttaattttgtctgagggtggggaaatttctcagaggaggtgacttctgagctgggggttgtggaagactgggcgcagagaattgtcaggggttggagtgtttcttaagtacgtttaaccaacctatcacgattttaaaagagggaggaggtgaggcctgcagtttagaaagccacagtatagacatgtttctttgggatacaggagcaaagaaaggatgtgcaggtgaggatgtaagaagtccttttgaccttgctagaggaaggtgggatctttaatatggaatgtgttcttttggctgtcaggctgggctgagtaggtaatgtaagtaatgaaacaaagtttagccctttcttgtgagaaagttaacttacatggttctcacctaagtcacgtgaatgattgtgagctggctaggttattgatctttactgacatttttatagaggctgaagtaatctgcgtatgttgacttttagaatgtgttggctcacatttaatagcaataatagctaatatttattgaatacttactgccaggcatgaatctcagctctttccatggatcatctaattaaatgtaatccttggaaggacccttgtgagttaggtcctgttatttctgttttgtagatgaggaaactgaggcttcagtgtatttactagcttgcccaagggctgtgagttggccactctaaatcccatgagctgagccactatgctagagtgatactatatgatactagcatgaaaaaataaaaagccacaaatctctattttcttacagagctgaaaaaggagagaaggaaggatttgataatttgtcatttgctttttatctaaacatgctttttgaagagaatctgccaccataaagttctgacattggtgtaattattctttgtgaatattgtctggaagatgtggtgttggtaactatgcttgctatctcaagtaatacattgttaaccagtgattgatttatgtaactatgaaaaaaactttaaaaaaagtagaaatcaatgtttaattatgcccagacatgtcattattgaactttgtattaagagattgtttaagcgtgattttaagagggcctaacccatcttacagattaactgtacaagttcatatattaaaatcaaacgtctctcattttgcctgccctcatcccctaagatataaaagattcccccccgtccccccactttggagctcattcttcgcaatatttaaaattgtagctctttgcatgtaatttagaacattctgacccatactcaactgctgggagactctgttatttatatttaaaatgttgacagtgagttaggaatttggagcagaaaccatatctaagtctaagtgaaaagacttcctaagtattggtagaactaactgtagtggggctgagtcattattacagtactgtacaggctgcgtagctatctgtagaattgataatggtaataccaggttaaagtgttagcgattcttctgctgtttcagaggtcttgaagtttttgcctgtctgctatggagatagggagttctcccccatttgacccccttagcaaagcacaatacttggctccatcagtctttagtctaagaagtgatatataggatcatggtttgacatcatcttgtgctgattctggttggcttaatggaatcaaattggatgaaggtaattaaatatgaattgtttctgatgctaatagatagttgtacttctgtctgttgggtatgggttgggatgggcggtagcatagctgattgcggtgggggaatttcagatagctgatgatgtggctatctgaaaattgccactacatttttaaaactgaaaagtgatggtaccgccaaatgaaatctgcagcatcctcagactcaatcaggaaatacttaagcattatgctccagggtggttttcttcccttacattgcaactggactccttgaggcacctttttagaattagtgagccgctaggatttttatactatgctttgacataaaagaaagttgcttgtcaatatgtgtttttttagtttaccagcatatcagatctcacaaacaaattttaggctcggattggatgtttctagtaaaaacaagaaaatccaggcatcactaaaagaatcagaaatacgttgtggcttgaaaggtgcaaactaaataatatagctagcagtaacggtcaccaactcctgcttttctttggttcagtagatagagtaaaatggaaaataggaaaccaaggtcagtccccaaatctcattttaaccaatagcagcaaaaaaaaaaaaaaaaaaaggaattgagtctgactttttccccttgctgtcagcataaagatggggaattgagagagttggaaagacattcattagtttgttcagattattaaataacatgtcttaaagtttatattccaaaattgggctgtgaggtttttttgttttgcttgttttcagtgcatgtgtggggtggggaggtgcaaaaaaatgtttgccttctaatatacagctttgttgtatattaattatatagtaacagttgtccctgctgctaatggtatggaaaatgattctgttgtgctttctgaatacatatcattttagaagtttcagattatactaaaaccatgttatttcatattagttggacatgaatgcatatttatatgacacatcattatcaacttttgccttttgccatctttttagtgcaaagtaaaactgatattcttcaaatccaaagtcgtttcctcagaagtgtgttttgtgagggattgcatctttcccatgtgaaactgtgtcgaactccagtaaactgtgtttgcttgggaaaatgaattcaaatgtaattagtttgaatgaagctgtggaaatgtttgaaatgagtattttgacattggacctggaggtttaaaaaaaaaaaccctattgaaagaatagtaaaatatattggatgtggaggtgagagtcagttgagtgaattttctgtgttgtatggtttagattatctgactatcccttaattattttgaaaccattaactttggataataagggcatttaggcaaacagttgacacatggatttcttaaggtaaaaagtttagagacttccaaactagtccttaagaggcgaatgggtattgtgtttaaaggaagctttcagattgtgtttaaacttcgagtagtaatatttggaactgtcttttctccctatttccatgcctcatacatctcaagtttgagcagcagctttccatccccatggctccaggccaatagctgcagtagaaaatctaaaatagaggccagggttggaataattagcattttgccaacccccaccctccctgccacctgcctatctagatgtggacagtatgtgctgtgttgatagcatagggcctgggaagggtggagagggatgtaaatgagggcagggtggacaaagtttgattgggggttgcggggaagcttgtagaggaatgtctgttagatattgatggtattttggtggcgttatgagaaatggctgatagtttgctgaaatgatttaatagtaaatagatattgttgaacattttctgtgtgtataggaaagatcctagatatttttcacactgggagagaagtgatgttactggtatctcatgcatatctctggagtatatagatcgtaatatcaactttggctatctgtatcgaagtttgtattaactgtctttatgtgtgtcatttatgtctcttaacgtttagtaagaaagaaattccaaggaaggtaggcaacttttaattttaacttctttcctttactttttttttgggcggggtggggggcagacagggtttctgtttgttgcccgggctggagcgcagtagtgtgattgcagctcactgcaacctctgcctcctgggctcaagcgatcctcctacctcaccctcccaagtagctggaactacaggtgcatgtcaccacgccgggctaatttttgcattttttgtagagacgaggtttctcgccatgttgcccaggctggtcttgaacccctgggctcaagcagcctgcccacctcagcctctcaaagtgctgggcatgagccactgtgcctgacccttaatttctttttggtaggtattcatttttcatttgttgtcttaagcttctagtttcactcacttacctgtctgctaaatttttctgaaatgtgtaataaatgttttaatttaccatctcccttctacccttcccatcagatttggggtggggaggcatctctaccaggcaattaattcccctctgagcctttgaaattaacatttttgtttctgtggattcaaggagcctaaagaacacagttcattagcattcctaagaaacacctaggtaagctccaacaaaagatgttaaagcaatcagtatttttagggacttcagatctcctgtatttgttgttgtaaatgatgatgttgggaaaagaatttaacagatccctgggtattctgacgttttcctatattttaagaacgaaaccgacccagccagcttgtggtcccattattctttatattgtttttcttagcacacgctagcaaagatagatgcctaggacttttcttggctattggagtttatagaaaaaaagttctttgttgaaggttagtcctccaccagaataatacaccctttttccccttagtagaagtccaaatgttaatcttgctatcatatatgtatgaatgcccagatttataaagctttgtaggtatattactgattgtgcaggagactaatctaggaggcttcaggatcattgtcatttgtggatctcattggctaagaccttttacttaacctgactccagtaaggtagcccctttgtttccttgtagttgactatgtgagctcttgccaagcagcagaagtgggatgaagggaactaattttgaaaacttattaggcaccacatttttatgtgcattaaatctgaattgaataaagataatatagattgcataggcttatggggagaaccagagaccaggaaaggaaacgtttttttctttttaccctttatgccttttcatgtcccctttttgataacatgctgccttggtccagattctggaaaccccactcaggctgtaattggtaagcttctagtacagatgtcagaacctgcccttgattatctgctgttagagatagcttggaccctttgtatgtggaatgttaggtctaggggaagagtgggggtgtgaggagacagctgtggtaaaatagaaaattggtgtaggattccgaaaaatcgagataagtccctgttcttcctatgaaacatgatctgaccactgaaccttgttttcttatccataagcaaggataatatttatgtttcacaaactgttgagaattagataagtatatgaaggtgcctctctgtcctcattgtaaaatgtaaactttgatgagacagcctctattctcaactggatctttattttgaatgttaggtttgaaatagtgattgatgttggggagtctgtctttcattggtattccctgttaaagttttaaatcttcttgacatttacacagtgaattgtaacatgtaactagtgttgttgagtctttacctaattgaatcagcagagcctacactgatgtcttccagttacaaagcggtcactgtaaagtaaaaggtgtcttcatatctaggtttgggctgagaaggatccaattgtatatctagttcctacttttcttttttttttttttttttgagatggagtctcactctgttacccaggctggagtgcagtggcgcaatctcggctcactgcaagctccgcctcccaggttcacgccattctcctgccttagcctcctaagttgctgggactacaggcgcccgccaccacgcctggctaattttttgtatttttagtagatacagggtttcaccgtgttagccaggatggtctcgatctcctgacctcgtgatccaccagcctcggcctcccaaagtgctgggattacatgcatgagccaccgcgccaagcctaattcctacttttctaagaatgtttacagcaaagtggtcattgccaaaggaacttgtagcagtacagaagatgggctcagaaatgaaagaagtctattgatgtgactaatttctcaaccatttaatagaattatggattttctattaaaaataacttgacccttttcgatgcatttaataaaatgccaagttcattatttgttaattttttaaaaccacaaaattcaatatgtcttgtgtcagcatattttttcaaaggccactattttacttctcccccaaaacgtttttaaattaaacagagaactctcaaagcacctgagaattacttcagtttttcatttattcaaatagttgcttaaagtgaccaacttggttttctttgaaatagtaattcttgggaataagaataccttaaataatataataaagcttatgtgtgagaatttagtaccaaatgccgtgttaacagttatgcgtgagtataggcatttgggagattccatgaaaaaatttgataaagtcagtagaaatttcagtaatggctcataagtctagctaatgctgaatattgaattgccttgaatttgtttttttggaagtgttacttaaaggaaataaacaaaagtcatttaaggatgtgttcactagtgttcattaggtttaagccaaatggatcttagtagagatcttacgccattcagcaaaaggattatcacagaagcatcacaacaggcgcagacttaaattcaattaaaagtaggcaggaggacataattttgttgtatagaaattatggaatagggcctaattttaaagagtcttcaaagataaacatatcaggaaaaatatagctcataaaatatggggaaaaaaatctgggaagatgagtatttgttaatgctctgtagctccattgccctcagtatacaaggaatgtgcccacaatagggttggatttaaaagtcttcaaagctttggtctctttttctttcgttttcctctgatacagaatgcgaatagtctcccggcctccaaccccctctacatccccaccaccccataatagagacttaaagggaatttaaattcgagttcttgagcttctgctcaatggctaggtctttgaacaagttaatatcagagccttagttcttcacctataaagtaggtttaatacttaccttacaacattgaggattaaagagcatgagaggattactttatgaaaggtgaagcttagaacagaatttttagttccttgccaatgctaaaaaacaacaacaacaacacctttttcagaaattgctttattaggcttttgtacaaagggaacatctttactttctttaaatttgcacatatatctattgtgaaattttaaccaagctggaggggtcactagggagcattgagtatgatactattgctgtaaatcatagaaaggctggctcaggagggtactgacttgctttgactttgcggcaacttcagttgtccagtgacaaggcttgctgcatacacaccactttgtttgtttctcataccttaaattgtggattaaaaatctttggggcaggcctggaggctcatgcctataatcccagcactttgggaggccgagatgggcagatcacttgagcccaggagttcaagatcagcctgggcaacatgggaaaaacctgtctcaacaaaaaaaatacaaaaattagccaggtgtgttggtgcatgcctgtagtcccagctacttagaaggctgaggtggaaggattgcttaagccccgggaggtggaggttgcagtgagccgtgagcatgccactgtacctaccccgttttgggcaacagagtgagaccctgtctcaaaaaaaaaaaaaaatcatcatcatctttggcagtgattaactttctcctttcacacttgggatggtgcaatatttggcatctacttaggaagctaaaattttcacgtttaattgtaaatggaaaagtttaagttgccatattcattcatacaaacattcagaaagtgaatattgtgactagacacagatgaacaagacaaacccacatgcctatcaggatgaactttgaaattagtacgttgtaggtatatacagtcacttcctctgttgagatttttcattaggcctcagtacaaaggctgctgtcatacaacatgaatggggactggaggtactttctggcagttaatatttcactatcagtgcaagagagtgacgtctccatttagtcctaatcgtgagtttttccccccttaaagaaattggagacctaggaccttggatttccaaagatttccaaactcttatttcttaaaatgttacaaaaaatggtttttttttgtatacctatatacccattaaacttttttgcctgaaataggcaaaaagatttaagttctgtgtatttatttcctgttatctttttgtatcagacatccatgttgcatgaattttagaaaaatagttttcagctgggcttggtaatggctcatgcctgtaattccaccattttaggaggccgaggcgggcggatcacgaggtcaggagatcgagaccatcctggctaacacggcgaaaccccgtctctactaaaaatacaaaaaactagccgggcgtggtggcgggcgcctgtagtccagctacttgggaggctgaggcaggagaatggcatgaacccaggaggcggagcttgcagtgagccgagattgcgccactgcactccagcctgggcgtcagagcgagactccatctcaaaaaaaaaagaaaaatagttttcacatttcctgagcaggtaggttgtcggaatggctagagatggtcacattctgtgtgagaaatcatgtgacaatagctaattcaagtatttgaaataatttaaatccttgaactgaattgattgaaataaagtatttaaaatcaccatcttcacatatttgaagaactaaaatcttagagaataaactctacttaaagtcctgggaaactaattttatgaaactattgaaatattattgccccttcctaatccatgaagtatcttgatatgggtaatacataaaagctgttaaagctcttcagagaaagatgcagagtacatagtggtattacttacagtggtttgaatactagaaaagtgatcgggacaaaatgttagacttactgtgccttaatcatacagtcagtgcatttttgcaggaatggatgcaatgtaagtagttcttactatttaataccagaaatgaagaaacagtagcttcttaggaattgattgtggctcaggatctatttcttaatttttaatgcttccacttaaccaggagaggaaagggaggagaaggaacacaaatttgttagtctttataactactggcttgttacacttgatttccaaaccacaagtgctccagggccaggcaccccacactgagaagtccctaagaagtgcatttattggaaatttgatttttaaaaaaaacctcatctctactaaaaatacaaaagattagctgggcctggtggcgcatgcctgtagtcctagatactcaggaggctgaagcaggagaatcacttgaacctgggaggcagaggttgcaatgagccgagatggcaccactgcacttcagcctgggagacagcgaggcatcgtctcaaaaaaaaaaaaaaaaaaaaagaccatgttaggttctgtttaagtagtatttcttataccctggaatgaatgaatgcctcttagtctttagaatttcataaggtttagctaggtatactcaatacttctccattttactacatatttttaggaaggcactaggtattgtgaactccttgagagttctaaacatctcagagcctgtttgagtattgatggcatagtcacagatactccatttcctttctagggaagtctgcctgcattaccacgtaaccccaagccagaagtgtaaccacttttctctgacttgcattgagcttttgttatcctcttttaatatttcattctgtagtagtctgtatttatgtgttttccttattaagaagtggccagcactttgggaggccaaagtgggtgaattgctttagcccaggagttctaaagcagcctgggcaacatgtcgggaccccgtctctacaaaaaaataacaaaaattagccaagcatggtggtgtgcacctacagtcccagctacttgggaggctgaggaaggaggatcagttgagcctaggaggttgaggctgcagggagccatgtttgccctactgtgccccagaacgagaccctgtctcaaaaaaaaaaaaaaaaaaaaaattaagagcactgtttcatcctgtatggtcaatacagatgcttttaccaaatgtttcagttgtgaagtgcaaactcctttctccccccagctggttgaagatcaagtgggagacttttgagagcttaacagtaagttttccttgtttttctcaagctgatatgcctaaaagtcacctggggatgattggtgaaaatacatattcctactcgtacaccttgaagttgattctatagtggaaggtactgaaaatctgcatttttaatgtatcttcaacaatcccaaatgattctgactaatgcaggtgacccataacctcctttggagaagttgatctatctgaactttactatcttatttggctaaagatctatattttgcttcattcaattacgatactccacaggttaaggtataaagcttacagggtgatgatgatgatgatgatgatgattattattattatttggagacagagtctccctttgtcgcccaggctggggtgcagtgacacgatctgggcttgctgcaacccccacctcctgggttcaagcgattctcctgcctcatcctcctgagtacctgggattacaggcacaccaccaccacacctggctaatttttgtatttttagtggagacggagttttgccatgttggccacgatggtcccaaacttctggcctcaagtgatccggctgcctcagcctcccaaagtgcttagattacagtagtgagccaccgtgcccagccaagattacaggatatttttaaaggaccagaacagtattttttaatatatgtttataaaagcttgatacttcactctaagttatagtttctacctttcagtgagcatttaccaaatagcagatatagttaactgcctttgcagctgttttactgtgtgtcagaatcctaatcctttctcctacttcagtgtttaacaagccatttaattctgatgttactttttcggattgggtgacaagcagagcacaatgagcagggtttgttttcatactaatactaggatggttaaatcaggactttagaaagtaagtggaataatttagtggaatactgaaaatccagtctgtggagctcactgcctttagattaaattagttggggacttcagctcctgatggtactgattgaaatggaagcatttgaataaagcagtatagttgacgcttgaacaacacgagggttagggatgctgactcctatgcagtcaaaaattcgagttataacttttgactcctcgaaaacttaactaatagcctactgttgaccagaagccttactgataacagaaacagtcaattaacacacattttgtatgttatatgtattatatactatgatctcacaataaagtaagctagagaaaaggaaatattaagaaaattgtaaggaagagaaaatatatttaccatttattaagtgaaaatggatcatcataaaagccttcatcctcattgtcttgttgagtaggctgagggggaagaggagagtttggtcttgctgtctcaggagtagcagaggagaaagaaaaccctcatgtaagtggactcaagcatttcaaacacatattgttcaggtgtcatctgtggttctcaatgtgtggtttcctgatcagcagaactgcattgtttgaaaacttgttggacatgcagattctcgggcctcacccatacctactgactcttaaactctgggagtagggtcttagccatttgggttttaatgagtgtctaccaggtgatcagatgtgcactgaagtttcagaaccaatagaatagagcaagataccagttttgtagtaattcaacctcttaagcagtattccttgttctttcacaaggaaccatgtatggagttcattacttgtgctttcttacagttgtgaagttggagtaattcataatcgggggaggatcttctggagtataaaaaaatttaaggagcagttatatgattaacaccagaaaggtttcttgtatttctactgaatatatgccacttcagtaggagaggtgtgttcagtcttattctttctacagctagtggcccagagaatggcctgcgcatttcaagccctgtcaatgagaattgtctagacaaagaaggtcccttggttgaattagtaataggatacatgaaacaatgtgtcagcacacttaaagtctttatggccagacaaagtatggtcttagtgtgtttggaggcccctgaccattggaaacaaaggcagtttaggctgagctgtggatccgcacgtaggccagaggtttgtagtcactctcactcttcccaggcattaagcgttccttaatggaagcaaaggaggacaagcctacaggaatgggcctgccctaattgagctggcctgagaagatacattttcaggttagacaagtcctttttcccttttaagttctgcctcttgggaaagaagatgcatttgtagtgcagggatgtccttgtgaaaatgtgacttgttatagagcagtatttgaaatgcaagtgcccagccgggcgtggtggctcacgcctgtaatcccagcactttgggaggccgaggcaggcggatcacctgaggtcgggagtttgagaccagcctgaccaacatggagaaaccccatctctactaaaaatacaaaattagccaggcgtggtggcagacacctgtaatcccagctactcgggaggctgaggcaggagaatcgcttgaaccctggaggcggaggttgcagtgagccaagatcatgccattgcactccagcagggcaacaagagcaaaactccttctcaaaaaaaagaaaaaaagaaatgcaattgcccatcttaagggtcttgtactagttaattactttcagagataagtaaaaaaattccagtgttgtcttctattaagagagcaaaggtagttagtaaaaatgggatttgtttgccctgctcccgaagcttaaaataattgctctatctcagttttgtcttatgcttcggcagactaataacttcagttgaaatgttttctgggcaggtgttcattgagggcctgattctccagaggttctgtgcagaagcaggctgctttgagatagccagcttagccaggcctgggaaccacacagaatagtgcagtaccatgtagggaaaagtccttgactgggctgcaataggcagagtggagagtgctaggaagcagagtattttcctggataatttcatccagtagaactttttgtcatgatggaaatgtcctatatttgtgctgtccaatatggtagctattagccatatgaggtgtgtctgtgtgtgtgtgagtgagagagagagagagagacaagagtcttgctctgtcattcaggctggagtgcagtggcgcgatctcagcttactgcagcctctgcctcccaggctcaggtgattcgaccctcagcctcccgatagctaggattacaggcgtgggccaccacgctcagccagtttttttgtatttagtagagacggggttttgccatgttgaccaggtttgtgtcaaactcctggcctctagtgattcacctgcctcagcctcccaaagtgctgggattacaagcatgagccactgcacctggcctatatgaggttttgagcccccttgaaatatgtggtaagtgggaccaaagaacttaattattttattttattttattttaatttaaatataaactagccaatagtggctaccatattggacagctctagataaaatttaggtaagacccaagagattgtggtttagattctgcttggaatatgagtgattggggctcttggaatttaaaaatccaaagacacgtgtgaatttgatgttatgagtttgaataacagccttccttcagtatgtctacattgttttatcctgactgacattgtaagtcctaagaggacttacaactggtaagtaaagttgtgtttaccaaagcagttggaagttcaggcagttgtacgttttatttgaccccttagagctaaacaggtgaaaatttcaggtcctttggatgaagtaagttctcattttatctcagcaaccctatgaggtaggttatgtctgttgcgtagttgacaaaacagatgaacttatatttatgtacacctttatggattagtagcctttaaaatggttagttttatcccacaacttcatttgaaattgtaagtttctagcatgttgcctataacaagaaggtaatttatttctatttgttaaattgttatcagtaataagtcaatatcctactataagtggtagagaatcaaagattgtagactaccaaatagcacccaagaggctaattcatgcaaggtgttgcttatagtaaaagcagatcagaactcagctgctgtatgccatctggggttatcttctcacttgcacgctcatgaccagtgtaggctgcatcttataagtaatctggctcacagttagctagacatatattagtctgatggaacaaaatccgattgtagctttgaccactatgaggaccactgtcatataaggtcttagataccaacttgagtaaattgcttaaggactgggaatagatccagattcctccaggtttagcttcaagttgtgatcagttttcgtgggatgcaaggagaaaatgaataggaatgaaataaatagctgatatttgaacatttttaatgccctaggcagcgtcttaagaattctaagctttcatttatcaatcctgaggtagttaacattactatttccagtaatgttcactgggccagtttacttttgaagaaattgaatctcacggtttaagtaaagtaactagctcaaggctatatagttataactaagccacagagcagggaggctaatctaggcctacctcatgccacagcctgagttcttagttgtgatacaaaacaaggtaaagggggacctggggtgacttagttgcctcctgagaattctgggctgtggtggaattacccatcagactgggggcgcccatctcttcacttatgatgtgtccttaacagactaaatgcaggctctgctgcactttaatgtaattctttccctattaagggaagcttgcttgcctttgcagcaaagccccctggatagtttattttttagcagttcagcttgtgcttggacccagttgttccagaaatcagtaaaacctatttgagtattcaagaaaaaggatctttttgttaactaaggattaactagaaaccttattttataagggttcctgaagtctgcttatttactaaggaatttcatcagaggtggttagcattttgtgaacaagtatgatgttgttcccacttcaaggggaataaataacaaatttaaccagcttgctgcttaagaagcagaattagcagtgggccagtcattggcctctcttcagagttctcatgtgactcacttagttttgcagagtgaggtagattttaaccactttcaagtcaagttgattggccattcatgagctgtgtgcagggagagaagagagacgagaacaagttagcagaaagctgaggtgtgttagacgggagttgtaggtaagtcagggaggatattcttcatttagaccctgagcttgagtaagacacctttctacaggagacattgcggatactttctagttagtactagcgcagtgttctgcaaactacacctgcttttgtgtggtccacgaactaagaatggttttgtatttttaaatttaggcatgtgccacataacaagatttctgtcaacaatagaccacttatataatgatggtcccataagatagaaggtggtatttttactgcctcttttctgtgttgcagatacgttcagatacacaaatacttaacactgtgttacagtttcctacagtactgtaacatgctgtacaggtttgtagcctaggagcaacaggctataccatatagcctaggcggtagtaggctataccatctaggtttgtgtaagcacactatgatgtttgcatgacaaaatcgcctaatgacacatttctcagaatgtagttggaggaaaaaaattgaaaggagagtattacttcatgacacaggaaaatcatttgaaatacaaattccagtgtccataaataaagttcactagaatgtggccatgctcattcatttacatgtaatctgtggtagtttttgtgctactgtggcagaattgaatacttgcagtggaacttgaatgggctacaaggtgtatttagtacctggcccttcacagaaaaagtttgctgacctgattgaatgtgcttgtgtgtatcacaggaagctcaccaggactcttggtatgtagcctctagctcccaaaggcatctgagccccactggcaggactcagttacctgtctctgtctaagcatgactccacccattagcgtccagacaacgaagaaaacttctattttaaagagcttgactaaccccctccttattatctaagttagagtagctgtgccaccccttaagtagcttttccttcttcctttcaaataggggttggaagagtagcaggtgagaacaacctctttcttcctcaattgtagagactcaatagtctaggctataaattaaaaaaaaaaaaaaaaaattccccagaggctgactcagcacatgcctgccttttaaaggaacagagagacccaattggaatagaaactgaaaataaaatcagcagcacatgaatttttgtaggtggctcgtatttgctattaatattgctcagaagactcaggaataagaaataataatgcagggtttcttcaaaatatggttctggacagtggattatagttacctggagagcttgtgttaaaatatctgaggatgattccaagtaccagggcttatacacaggaatacttgagaaccactgcactcaagcatttaaaattttccttttacctaaatccacatgggccaagacaatttttaaaattcatagaattcatgtgaccagacgtaaggggtcaataaaggtcattttatagatcagaaaactgagacccaaagctgagaaataagttatctaaaaccccaccaggacattgcattaaaggagttgctctaagcgtgtcttcttactattagaaagtgaaattgacttttaaatctgtcacttagtttttggcataataataaaacaatgaacagtctgttctggctctaattgcgcctagaatctccagatcagaagaccttcttgtagatcaagtaacatacttctctgaaagacagtttgtcggtcctatcactgaagtctgaattatttttttgatttttaaatataattaattggtccctggaaatgagaaccagaggaagataagaagatgaacttgaatttaaggaccataatggaaggagtgggatgggaaagaaggctgtaaaataagacagtggttgtggagagacagattaaggtaaggagagaaggttgtaaaataagacaggaaggggttgtggagagacagattaaggtaattgtggtgttgtaaagccataaaagaaatttaaatgcggaagtggcctggaagagaaaacattctctgatcatttaacccttttgtgtgtgtgtcagtttgaggcgtaaagtagacgaatagcctccttcttgtgtgtcttttccatggcaaagcctttaaggataatagctgaccactaatctcacacagctgctgatgtttaagaacctaattcttgaagtgtttttaagtcagtttgtggcatttcttctgaacacttgggcactttggaaattgtagtgacaggttttagaaatttgaagttgtgttgcagaggtgataacaaaattgggtctttgagcaactctgagtcttttaatgcagtgcacttctaagtttccgatggtatttccccaagttttgaatattgaaaagaaagaccacactttgcaaaataattggcaactttcatttaattcagtttgaccctgtcttgaacttggtctttgtaacttcttatgagggtcttttccaacggtaacattagaggctgattctggaacttcatggaggcaagtccagtgaaacttgggcagttagggggaccctttccctctcccttttcaaagttactcagtcagcagctgctactgttgggatggcgtggtcaggtgggtattatgcttattatgaaacttgatgagggcagggactcagttttggggctgagttgtatttcaacacttaagtggcactcagtaaatacttgaacaaatgaatattgtgaatcccaacttccttaaggacagaagaactatttatacttgtctgccatcttcttagctagagattttttttttgtttgttttgttagctttcaagttgaggtccctaacaggggaatcccatagtttcaatgatgaacaggtccatgacaaaaattcttgtttatatgcaatacacatttagggagaataaatggtcatgtggactttaaaaattggaaatgttactagtctcttctctcattcttttgttttgttttatgttgaggcagagtttcactcttgttgcttaggctggagtgcaatggcacgatcttggctcactgcaacctccgcctccgggttcaagtgattctcctgcctcagcctcccaagtagctgggattacaggtgtgcatcaccatgcccggctaatttttgtattttttagtagagatgggctttcaccgtgttggtcaggctggtcttgaactcctgaactcaggtgatccacctgccttggcctcccaaagtgctgggattacaggcatgagccactgctcccagccctcattcatcagttttttaagggtttctttagagctgaatcctcccagcagttttctttccttttgaattccagagctctttgggcctttagccagaaacagtctctgtcctgcttactttgaaaggctgttaactatgccctggaattttggaaatgttctccttgagaattgctgtaaagtagtgataaggactcttctgtaggctacaaattgaaaccagccaccattaagatggctcacagacagggtgtcctggattgaaactggaccaacgttggtatagtctgaatttgaggagtaaaaagaaatatgcccttccctctcccctaacagttggggaatacttgtttttactcctcaaccattccccttttaatgatgacaagttttcaggctttttcactgcctttagttttgcattaagttcctgggagattcacacacccctgatatttactgcactcctggatgccagttttttatcactcaagaccagcttgttatctgtcctagacagaagccatcttcttttaaaagtattagaacatactgggtatagagtgttaaagagaatgttgatttttttaaaacttctgcttttggggatgtgatatgggtttgaaagtcagggaggaagtagaagatgtaagggtttgccccagtacaagagttttaataatgaggtgataaatattttctttaaataatttattcacccattgtgttcactcaagtggttctagtgttcactttccttatgcgctagttgtatatttgtatgtcagagaagagcagagattatctttgacagaagttatattgtgagtgtctttttggagaaggtaggttttgattgtgtaactatgccacacctccattccccatacacttgacttgatgattatctttgaaggaggagcccatcatattatacagctgccctaagtctcaaatctatcatcaaaaggcagtgtaaaggggactggctcaaaacatggcaaagagtctcctttatatcagaaagctctctgcctttgcttataaggcagcaaaggactcttcttcctgccctgatctgattaccctaaaagctttaagatcatggaatagttgataaaacagtcagtattctgtgctgatgacttatccttttctcccttaagaaagagtaaatgtttttgcttggattgagtttagagacaccagatagaataagattggcaacactgttagccacctgctgaccacagctaaacaggcatatgtgcttctgcatggggaatgctatggcgttaacagtgccttccttaaaacctgtaagttcgttaggcttccgggtaccagggttgttagagtaggccacagtttacttcctttttcataagtgcttttctttcctggatctcagtataggaaggaaaatcagacagcatttctcagttgttggctcggtgggcattgtgaatgggtatggttgctgcctcaaatgcacatatacaacctgagctaagttgtatgaaatgattgagtaggctgacttcagttctatgtaaattaatcaaggagaaggtttaggaatggttgtaccgcattgacagttgttaacatgtttataatttcttggagattagccaggaattctgttacaactacacacaaatattgattgactttcaaaataaaattctttaaaatcactgaaattttctgagcccaagtttcttcatctgtaagataagcaaatttactaaggtcatgggtatctagtacatgatggacagagatttgaagctctttaccactgatttatgctaccttctcatagatctagtagttaagtgacttttacccaaggtcatacactgagtgatagaacaaggattttgaataagatatttttcactgttgcactggtctgctttctccagcttccttcagaggtccctaaaggggacctctgtgctgctctgcagtgcctctatcacattagggtttggtcatggtcttttgtgctcatcatgtttgaacatgtttatcaaagtattttacagacttggttatttcttcccctcatgtaatttgtgtatttgtctgttttccctatggagaatgaactttttatcttatatatgcctgatgtgacattgatttggccacttggggttgaccttgtacttggtttccatatctgcagcttcattgtcattttgggtttaggccagctttcaggaactttttaacagttggatcaaattttgttggattcatttgatactgagtttcttattcctgtatattttgtttcctttctatctaagcagagaactaggactctagagttacaagaagttagagtatatctataacttttttaaaagaaaaaaaaaggaccaggcatggtggctcactcctgtaatcccagcactttgggaggccaaggcaggtatatcacttgaggtcaggagttcgagaccagcctggtaaacatgctgaaaccctatctctacaaaaatacaaaaattagctggccatgatggtatgcacctgtaatcccagctactcgggagcctgaggcaggagaatctcttgaacctgggaggcggaggttgcagggagctgagattgcaccactgcactccagcctggacagtagagtgagactctgtctaaacaaacaacaaaaaaaaactctgttttggacacatgactttagggagataaacataactctgggattttattttttaatatgctcctgaaaacagtcaactctcccatttcctagctgggagaagtatgtctcacttaattttgctcattcaggagaggatgaatttttcagcaatgatagtaatagctggctgttgcaactcatttcttgctgcagcgtagcacatccaccaagaatgccctttcaccttcctttgtcttgccaactccctcttagctttcagtaagacttggctcaaactgcatcctccaggaagcctatgttaactcctaactgccactcttggatccagggtttttatttcatcttgttcgctggtggaaccgggctgttttatctcattatattactcttcactttgaaacaaggaggcagttaacctagattcagtatttttactcttagactttttttcccccaaaatgcccataaattaagcaatcttactgccttactgcgcttactgaaaaatagcagcacagcagaaaaatagaaaatcttgctatcatgtaagagatgtggaagtaatggtgcccacatgcttcatttggaaaatgtctattacctttataaagagtttgtatagtttctaaatacaggagcattatgatgcgatagaaactgttactttaatgttaattgacgttcgaaaatttgagtttcaaatgtttcctaaaacattttttcttaacccttttgctattccattgatctgccattctacattctgcctcctttgtttccctgtcacttattaaaaatactgcctcttaactttgttgtcatccacttatttctctagatacaccttggagtgttttttcaggctgaattgttaggcatgggattgctgggtttaaagagggagtgtgtgagtttgtttgattttgccaaattcttccttcatgggggttataccaactagatgcaccttattttcagagatggtaaaatgaggcaaaaagtatcttagatttgaggaaatcgttaccacccagagttgtgaaacttagaggtgatatatgtaatactgccttgcacaaaatatacatttagtaaaggatactgatatggtttggctgtgtccccacccaaatctcatgttgaattgtagctctcataatcttcctgtgttgtgggagggacccggtgggaggtgattgaatcacccgggcagttacctccatgctgttcttgtgatagtgagttctcatgaggtccgatggttttataaggggcttccccaccccgcccccgcacctgccccactttgcttcacacttctccttgctgccatcatttgaagaaggacgtgtttgcttccccttccaccatgattgtaagtttcctgaggccttcccagctctgcagaactgtgagtcaattaaacctctttataaattacccagtcttgggtatgtctttattagcagcgtgagaatggactaatacagatacctagatacccattattatcttttgtgaactgggactatttctctatcgtaagagtggtaagaaacttgagttgagatagtgtttgaaagcacgctagcatggtgctggcacccgtattagtgcccttttctcttgtgtgccttgggcagccagctacttgagattatatcttaattaccttaatggattgtaaactccttgagggcagagtccttgtctggtgagtctttagcaggaagctttggacttgaatatatttggttttaaattgaattagtcttcagaatatatttctgaaacagtaggaaaaggatttcttttttttctttcttttttttacacattagccctcaactcctgtgtaatgctacctaacatctattcctacagtaggaaaagacagagacactttccttttgtctgtcggaagcttctttacttaaaagctttttaaaccccagggaatacgttaggtaacaatagcaaaagatgttgattcctgttctatctgtttaacttatctgtccttagggagtaactccagttaaattacagtgaaaggagttagttgccataagtcttctgttttatcaagattgctttattgcagggggcttcctcccatgtcttcatctagaattttcactaggaattaaaatatttgttactagaaagcattagttggcctgaattcacagtgaattaggttttctgatgatttaatgtgcactggtttgcatctttcatatctgtcagttaaattcaacacatttctttttgcacttaacaggtgcttgaagtggcagggtccttcctctaaaacattttaaataacactagtagatgaattccagttaaggggaaaaggtatgtgctgaaagtaatcttcaaggccacagtatgttctctccaaacacatgttttcaccacgagggatgtagatctgtgtgcccttattggctttactttttcacttactggcatctcttctgaccaacatctttagtcagatgtcccactgttaccttagatacaatatggctcaggctggtccatcatttctccagtatttttcaccatctttattctgtacaagtttcttgtttttgccaaggccccttgttcccccagtcacctggacgtaaagactttctctgactctttattacactgcatttattacacatagtagtgagttcctggaactgggttctacttccattttcccaaatgtgcttttacattttttccttccttcttagttcctttgctgtcactttttttgtagattgcttcagaaacctctaactatttattttgcttttacttttatctcttactatgccttaacacaaaccctctcttggaactaggccagtcttcttgccatgccctcacataataacacaaaaatgaagggttggaaaggaagaagcttaaagataatgtttaacttatgaaaagtttcaagcatacacatagagaaatataatgaactcccatgtgtctgtcactcagcttcagtaattaccaaccttttgccagttgaattttgtctatccccgtatcccttggtgctcccccaaccaccaccaccagagagtattataagcaaattccaggcatcgcttacatggaagtacttcagtattcatctttagagattctttaatctgtcagtttacctactgcagaatatctctacagtttccctttcagttggttatttagtttgtttaaatgcttttggcgttcagaaggcatcccattcttttagtggttagttcttttgtactgacctcaatttgcctccctatcatttctcagcagtaatataaatttatatttactcagaaattacaaatttactgagtaaatttatataatacaatataatagtcattaagatatttgaagaagttgccatgtaatacactttttgacacacctttcacagcacacatagcacatgtaataacttttatttgtgttttagagagagggtcttgctctgtagcccaagtggagtgtggtgatgtaatcatagctccatccttgaactcctgtgcccaagcagtcttcccacctcaccctcagagcagccagtattacaggtgcaccaagatgcccaattaattttttaaacagttttcgtagagacaaggtcttgctatgttgcccaggctggtctcaaactcctggcctcaagtaagcctcccaccttggcctcccaaagtgttgggattgtaaacatgagccaccgtgctcagccattcctttaaaataggaatacttggggttcagatctttgacctaggtcttatttgtatcaatgagattaatgagccacagccccgagtttctcaccagacatttttgatttgcatttttagacagcagttgctttaaaaaacttggggacctggcttaaaatcaattttgaaattttgtgcattaaaaaaaaaatgtggccgggcgcagtggctcacgcctgtgatcccagcaccagactttgggaggctgaggcagatggattgcctgagctcaggagttcgagaccagcctcggcaacacggtgaaaccccatctctactaaaatacaaaaaattagccgggcatggcggcatgcacctgtagtctcagctactcgggaggctgaggcaggagaattgcttgaacccgggaggctgaggttgcagtgagccgagatcacaccactgcactccagcctgggtgacagagtgcacctgtagtctcagctactcaggaggctgaggcaggagaattgcttgaacccgggaggctgaggttgcagtgagccgagatcacaccactgcactccagcctgggtgacagagtgagactctgtctccaaaaaaaataaaaaaaaaaaagttattggcagactgttatctgaaacctgcctggaattactttcaatttatcctttacttaatttcctttttaagtttagagctttttagtgatttaagcaaattttcctatgtacactagtatttgtcaagataaatttttaaagcttggtccattttttactataaaagtaattgtggggaaaactagaaaacaagatgaagtatatgcacaaaaactcaagttactcataaattgactaccctaagataactgcttttaatattttgatgtctgtattccagtcttcttcatatgtatttatgcgtttgttgaattatacacagagtagttttttttaatgtgatgtcctttccatactctagggctgtattagcagatcttgatgttctgaagcttgtttattgcatctggcctgcaaacaaaattaattgacacacatgctttattccagattgtggtgctattacatgtattgtcattattatgattttagccataagtgtttggtttgaggcagaagtagtgggatattgctgtcaagtaaactggggccactaaccttgtgggaatcaacttagcattttaaaattatagactcgaggtttttagaagaagctgaagggttctgtatgctgcatggaagattgagttcaaatcctacttctgacaccatatgatattatttttcccatctctgtaggatgggaatttcttacagttagtactacggtcatgcagatttctattttcccagggcctgacacagaatagatgctcagcagattatgacacatgtggcttcttttgctgtgagccagtcatgggatgaagacacattgcctatgcattattaattgattgctataaaacatgttgcctcaaaatataatagcttaaaacaacagacacttattttctcatgtagttcctgtgagtcaggaatccagacatagtttatctgggtggctttggcttaccatctgtagattgcagtcagtatgtcagccagggctgcagtcatttgaaaacttaatttaggctagaaggtccacttccaggatggctcattcacatggctaattggcaggaagcttaagtttcttactacatgggcctttccagagggcttctgagtgagtacatgacagtgtgtcactggcctcccccagagcaaggagagagcaggaaggaagatctaataccttttatggcctagtgtcggaagttgccccctcacaattccacttcatcttgtttgttaggagtgagtcacagtgtccagcccacactcaaggggaggggaattaggctatacctcttgaaaagcggagtaacaaacaatcttatagtcaagattgtgtttgtgtaaggttagaatagagggtccggaaatagacctataattatatgaccgctcgaaaacgccaagacaatttaatggggaaagggccatcttttaaaaaataatgctaggctattcacagtagcagaaacatggaatcaacctcaattttcattaatggtagactggattaaaaaaaagaatgtggcgcatgtacaccacggaatactgtgcagccataagaagaacgagattgtgtcctttgcaggaacatggatggaactagaggccattacccttagcaaacgtaacagaggaacagaaaaccaagtattgcatgttctcacttataagtgggagctaaatgatgagaacacatggacacatgtaggggaacagcagatacaggggccttttggagggtggagggtgagaggagggagaaaatcaggaaacataattagtgggtactaggcttaattcctgggtgatgaaataatctgtacaacaaacctccatgacacgagtttacctatataacaaacctgcacatatacccctgaacttaaaagttaaaaaaaaatggtgttagaacaacttgacgtctttattgattagaaaaaaatgaacactggcccttaactctgcaaaactgctagaaaataaataaataaataaataaataaataaataaataaataaataaataaggtggtggtggtgatatgcccttgtaatcccagccattccaagggctgtggcaggaggattgcttgagcccaggagttcgagaggagcctgcgtaacatcgtgatataagaaaatgagactctttccctgcctttccctgcaaaagagagagagagaaaatctgtgtagcccttgagtaggcaacgatatcttggggcacaaaacatacagaccctaaaagagaaaattgatgaagtggacttgatcaaaatttaaaacttttgctctttgaaagacaccattaagaaataaaaacaagaaaatgatggggagaaaatattcacagttcgtatagctaacaaaaaattggtaatccagaatgtataaagagctcttacaactaggtagtaagaagaccaagaaagatttgagcagatacttcaccaaagaaggtatatgagaggccaacaagcacaccaaaagatgcttgtcattaaacatcatttaatcatcagaaatatgtgaattgaaaccacagtgaggtaccactccacacgtgctagaatggctaaaattaaagactgatagcagatattggtgaaaatttgtagcaattggaatgctaatgaatttttgatggagatatacaatggtacaatttggcaatttcctgtaaagttaaacatacattttttatattacccagtaacttttctcctaagtatgtacccaagagaaatgaaaacatgtctatagaaatatttgtatatgaatgtttgtagcagataaataataaccaatgcctggaaacaactaaattgtccagcaggtgaatgggtaagttacagtatatccacacaatgtaacaccactcagcaataaaatggaaccaacaactgatatatccaacaatgtggatgaatgtcacaaatgttatgctgagagaaagacatcagacacaaaaagaataaatcctatatgatgttatttacatgaaatctagaaatctagacaaatctaatatacagcacgatcagatcagtgcttcctttgggcaaggggtggaagatggggaatgactgggaaggagcacgagggaaactttctgagatgatggacttgttctaaatctttattgtagtggggattgcacctgtgggtgtctttgaaatgtttattattacagttatttcttaatatttgtaggggattggttccaggaccaccccaccccctgtccctagtataccaaaatttgcagatgttcaagtttttttgtatataaaatggcacagtatttgcatataacctacacaatccttatatatactttaactcaccaccacattacttagattacctaatacagtgtaactatataaatagttgttatattgtggggggatttgtatttttttggttgtattgttattactatttttatttttccttgaatattttcagtctgcaaatggttgaatctatggtgctgaacctgtagatatggagggctgattgtattttattgtttagacattacaccttattaacattcatttaaaaacatctgttgaggtttggatttttcagaagttataacatctgatctttagagtcagtgttcaatactatccctttgttatcatttataggtcaggcttaatagtattatgtctagggagaaaaacgccaaactgtggcttctttccacagaataattggctctcatttccttatcctccccatattagtaacttgtcttgattgtagaagcaggctaatgggagctttgtctgggcttctttgtgaaagctttttttttcagtggcatgtgctattatgcctaccatgccatttgaatcctgtcattgtacttcttgaccagcttgtcaaggtaggcatacagaagatagctcatgactcctgttaactgactcatctcttatggttgcagattctcataaacacaaagataaacacaaagatcgagaacaccggcacaaagaacacaagaaggagaaggaccgggaaaagtccaagcatagcaacaggtaagggtggaatcaagcaagtccctcatcattcagcagtgggttggccattgcttggcttacctggaataggtcttaacttgagctacatgtaaagatagcaaagtaagtagaaactgtatttgatcctagagttgctatgaggatggccatgatttaggccttaaatgggatgccattgttcagatcaagatgtataaagcaagtatgtttaattttcttttaatatatacctcattaaaaatacagttgttcactaagataggtaaggattcattgtgacacatgatggcatttaatcaagtctgtagcaagcttgccttgataaaaggtaactggattggagacctgattttttttcttctttctatattttaaagagtttacattaaaaattcttaacttgggcttccatggtctgttagcccctgaaattatatgcaaatggttgagtatatgagatttcctggagagactatttgtagctttcatcatgttatcagaggagttcggctcccacaaaagcctacaatcaccaatatgaatgaaactcaatagtgctgccttttgggatgcaagcctcaagaagatgtttcttttgttcattttgctcccatttttttggtgtaggaggcaagtggttaaatctagttattgaaaatgaggacttgtacttccattctgatttaaagacagttgttggtgagaaagccatatggtattcccattcccatagtggcctgagctaggttagggaatgtaaagatctgtcacacattagaacaagtgtctccattgtagagttcttagaacttctttattaacttgtctgattgtctgtagacaagttaaagtgagaattgctttctaagtctgttctttttcgcgaatcattaaaataaccagatttaattttctctattggggacatttctttgggaatcatgtatcatgcctgtggccttttttccctatccctcacttatctcttatcacttgatcatctagtttccattttcattattctggtaaatttaatctcagtagttgaatctactctacatcttttctagtttatagttgtctagcttatgttaatatctaccgtacagcaaagaatattgccaaggataaagaagttcattgcataatgataaaagggacccattaggagaacatagcagttataaatgtttatccactaacgtcacagcctcaaaatacatgaagtaaatctgatagagctgcaaagagaaataaacattcataattatggtcagagattttactatctttctcaataatttttagtccaaatagaaaataattaaggatatggaagacttgaacagtatcaaccaacttgatctaatcgacatttataggtttttcccatccaacaatattagaattttctcttttctttctgtctacttttccgcttttaatttttttcaggttttattttagattcagtgggtacatataggcaactttgttacctgggtatatagctgtgatgctgaggtttgggtacaaatgatcctgtcacccaggtactgagcatagaacccaacaattagtttttcaacccttaccgccctctctgctctagtagtctccagtgtctattattgccatctttatgtccatgagcacccgatgtttagctcctgcttaaaaatgagaccatgtggtatttggtattctgttcttgccttaatttgctcaggataatagcctccagttgcatccatgttgctacaaaggacatgattcagttctttttttatgaccgtatagtattccgtggtagatatgtacaacattttctttatccaatccatcattgctgggtacctaggttgattccatgtcttccctattgagaacagagctgcagtgaacatgtgtgtacatgtgtctttttagtaaaatgatttgttttcttttggatacataccaagtaatgggattgctggatcagaaggtagttgtttttttaagttctttgagaaatctccaaactgctttccctagtggctggactaatttacattctcatcaacagtgtataagtgttcccttttttctgcagccttgtgagccatctgctggtttttgatttttaatagccattgtggctggtgtgagatgatatctcattgtggttttgatttgcatttctctgatgattagggacgtggagcattttttcatacatttgttggccatttgtatgtcatcttttgagaaatgtctgttcatgtcttttgcttgttttttaatggggttacttgttttttgcttgttgaatcatttaggttccttatagattctggatattatacctgttagacgcatagttagtgaatattttctcccattctgtaagttgtctgttaactctgttgatagtttaattagatcccatttgtcaatttttgcttttgctgcaattgcttttggcatctttgctatgaaatctttgctcgttcctatgtccagaatggtattgcctaggttgtcgtctagggtttttaacagttttaagttttacatttaagtatttgattcatcttgaattgatttttgtatgtggtgtaaggaaggggtccagtttcagttttctgcgtatggctagccagttatcctagcatcatttattgaatagggagtcttttccccattgcttattttggttgactttcttgaagattagattgctgtcggtgtgtggttttatttctgggttctctgttctgttccatttggtctatgtgtctgtttttgtaccattaccatgctgttagtgtttctgtaccattaccatgatgttagaatacattctttttaagtgcacacgaaatgtgccaaaatagctcatactttggaccccactctccttaaaccatcttctttggctttaatgcttccatgcctctccatctttctggccacctttttcacctctttctaatgcacagtcattccttaacagtttttggctgtcttttctctgctacctgttttgctgtttatccttatttcacattccatatttggtcttgtgaacttcttttcagttccttaaacatagcatgttttctgatgccgctaagcctttaaacatgctgttggttctgtaatactctcttgcccctttgctgtcattcttttagttgcagctcagacttgacttgttccaggtatcctttctaccctccttctcatattaaatgccacttttgtgtgctctctggtgccttgaatatattcctagtgtaataattattatatttaattgtgtctttacttttccctatggcctcctggactctaaagtccctgaaagcagaattgggatcttttttgttttttctggggtggggcggggggctggttttttgtttgtttgtttgtttgttttttgagacggagtcttactctgttgcccaggctggagtgcagtggtgccatctcagctcactgctatctccacctcccaggttcaagtgattctcctgcctctgcctcccaagtagctgggattaaggtgcgtgccccgacacccagctaattttttgtatttttagtagagacagggtttcaccatgttgactaggctggtctcaaactcctgacctcaagtgatctgcccaccttggcctcccaaagtgctaggattacaggtgtgagccaccacgcccagccttttgtattcattttgcatccttcaggcttagtatggtacctggcagatagctggcacttactagtctatatttattgaattaatgagtggatgatctatgggtacattaattcccatctctctttcttctcacgtactcttaatcttctataggatagttattaagtcactttggcttatctcatttttcacacaattgtgtgtggtaaaataaacataacaaaatttactgttttaaagtagcatttagtacattgacaatagtatgcaactgtcaccactatctccagaacttttcatcatcccagtctttgaattcactaaataataacttttcattctgttcccctgtcccaatatctttctactttgtctttttttctctttcccttctaccttttatctttatgaatttgcctattctaagtacttcatataagtggaataatacaatatttatcttttttaaatctgttctatattcccttaatatgttttcaaggtttatccgtattgtagcgtatcagaaattcattcttttttatgactgaattatattccattgtatgcctgtaatcacatttaaaaaaatccatctgttgatggacacttgggttgtttccaccctttggctacaaatacatgtttgagttccactttcattctccggggtgtatacctaggagtagaattgctagatcatgtccaacaatgggtggctgcctgctatgtttttactgtgctaattgatgtggtgtgaaaaaaaaaattagataacctttgaccgtgaacagtatcatctgaggaggtgagagacctgcttacagatcagatgaagaatgttgatttttatattactaggctgtaagaagaaattccaaaagactttaagaagaaagaggttaatatttaaaacataagcttttgaaaacttatcttctctaacacattctactttgttttgggaggaaagatacagtaaaagtgacataaagggctttgagacatataagtttggccctgtcctgttttacaaaaatcttctcttaaaaaaaaaaaagggatgtgatttttttagaagaaatcctcatccttgtacatccatttaagtctcgtgatcttggctaggttacttaaccttcttcaactcagtttcttcatcttcatcttgatacatgcttcacaggggaaccatgggagtcaataaatatagaagctcttcagttgtgaactgctctacagatgtgcagagatgacacttttacatctatttaaaagcatacttttccaagatcatattgtaggtaaattcaataatttgttgtatgtacttttgtgcctcttttcttttctttttttttttttttttgagacagtcttgctctgtcgcccaggctggagtgcagtgacacaatctcggctcactgcatcctccgcctcccgggttcatgccattctcctgcctcagcctcccgagtagctgggactacaggtgcccgccaccatgccccgctaattttttatatttttagtagagacggggttttactgtgttaaccaggatggtctcaatctcctgacctcgtgatccacctgcctcggcctcccaaagtcttgggattacaggcgtgagccaccgcgcctggccacttctgtgccttttaatattttcttcattcctataaaaatagaagcctttttgccaagagctattggaaaaacctggcccgagtttctgtttacatatgacatgactaaatctagcccttggtttcttattcacatgagtaaattttaacagtttaatcagatgatctgttgtaagcaaacttttaagtacttcttgttttgatgtctactgacacagtacctctttgcaacaaagcaaggatattggttatattccagtaaaattattttattattttttttgagatggagtctcactttgtcacccaggctggagtgcagtggtgtgatctcggctcactgcaacctctgcctcctgggttcaagcgattctcctgcctcagcctcccgagtagctgggacttacaggcgcctgccaccacgccgagctaatttttgtatttttggtagagacgaggtttcaccatattggccaggctggtctcgaactcctggccttgtgatcctcctgcctcagcctcccaaggtgctgggattacaggcttgagccaccacacccggcctccagtaaaattttatatacactgtgatccttttaaagtacctctgatctttttaaatagtttagggtttcttcgatttcttctgtagcagattaaagaaatctgggggattatttaatcacatctgaaccccagaataattagtatttagcatgttctgttccaaaatgctttcatttattccaatccttgctaatcaattgtagctaattttgtggccatttgttaggagaaaacaagtgtttcagatgtgtttctgtgtcccttccttctctgctagatattagcaccaatcatttgtcatcaggctatacttaggacccaagcccaggaggcatttactgtcctgtgcagtagcaatactgcagacttggagtgggagagtagccattatgtgcagaaacaaaatggggctatggatccacatcccagaagatgccatttggtttcctctttattgtcctcatgcaaggtgcaaaacaagggagtaggtattaagaatcatttcatcttgtcttctctttgtgtggacaggagtctgaggtcacatgctctaagtcccacagtgatgtggtagcagaaagaagaggatgtgagaccaaggatcctgagtccccactacattattccttccagtgaaaaatacctccctgtgtaaaaagagttagttttgtagctaaactgtctgtttaaatacaagcaccccttacttgtatgcatatggtaggcagctcaggtttaaaaatgtcagatcacctcaggcactgcctttatctctctttgtccccaaatccctgaaatctttggcactgaaagtattaatgtcatcaaattctgaacctatgaaaacttcatctctgtctttctcttgtctggcctgtaacatgacaagaacagctcacaccaaagttagaagataatttcatcagtcatcacttatctcttgacactgcttctttctgttagcgttaatattttgctcctcagatcctttttctttttttttggagtcagggtctcattgactgctaagcttgggcgcggtggtgtgattatagctcactgcagcctccctgggcccaaggggtcctcccacctcagcctcttgaatagctgggacaataggcatgcaccaccatgcttggttaattaacttttttgtttttaatagagatggcggtcttgctatgttgcccagggtggtctggaacttctgggctcccacattggcatcccatagtgttggggttacaggcatgagccaccatggccggccctcttttaaaaaatacataaataatctcaaaaggaatactcttctagatgccaaggaattacgtagcttgtaggatctcacgagctacctttcttaaagggttacattcttatccattgtttatctttaatagtagatctcttgtataaacagaatattattaaaagcaatttgggaggggggcttgattttagaaaataagagaatcgtgtgaaatgaaattcctcctagttttcgactctgtgcatctcttgccaattttaaacctggcattcacactggagtgacaaatttgtggaaagcaagggaagacagaaaactgctgtaaaatagcaagggaagtacttttccagccatattggcagtgctattctgtactgtcagtgtgagaaacatctgagaataaggatgcttttggcttctgctttccttttagttccaaatcctacctgaattgtaattgagagaatgtaggattttaggaatatgcacttgaattacgcatctagttctcagattaggggagatttttctgaaattaataaaatttaaaagatatgtttgctgctttccttgtgagtggtttgccaaagccctccctttgtctacacatcactatatcatcctgtctgtgggaaatggacaactaacatgggtaggcagagaagattgaacagtttggaaatgaggaaactcagtaccaccaccattcacatgggagtcagtatgatatattgaatagcacactaagataaaagttaagaggctgggttctgtcatttataagctacgtgtcgtgatccaaggtgcttaacttctctgggtctcattttctgttttggtcaagggttgataacagtacctgctttatcaatctttcaagtttgtttatgcacatgacagctctttgggaactgtaacatactaaataattgagataatgatggtgatgatgataattaccgcaaagcctagtataatatcatgcagataaattggagctcttgagtttggtagttgaatctaattcagtagttattgatagcattcaatttggagccctgatattttcaatattatatttatccctatcatagtacgccataatcattgtttttaagatttcatggtggagacagcatttgagctagccattcaaagatggttaaaattttgctaacggaaagtaatggttagaaagaaaaacataagcaaaacatagaggcattgtagtatatgctttgttctgggaggaatctagttaggtgggttacacagggtggaatagtagaaaatgagacccaaaaaagtggcttgaggcaaaactattaaatgccatttcaaaaagttggaacttgttacttacactaactaaaaatcggggggaaatgttgggactcgattctgagctgagcaagaagccactggaaatacttgagcaaagtggatataagacttagctacaaatgacatgaagggtctaagaaaaagggttcctgtcttggataactgggtggctgttcacgctattaatagagacaaagaacttaagggaggaatgggagttagaatgggtatcggttttgccatctttgggcacatccttttatcctctctggcctgaaaacaaaggattaaataatttctaggaaattacatttaccttgaagttttgatacttctataatataaaacgccggagtccttgtgattttgtttagagatatataatcggcattgtagtgtgtaatgatgatggacattaaggaacccttgtttcttagtgccttttggaaactggctcatttcagaagctgcgctcttttcccagaggcaacttttgaagttacttaaatatttaatttaacaaatatcatttaagatttaactgtctactatccttgaaagggtcatgagtttccctcctaaaccaagactttgaagctctctgtgctgtctcacaggaatccccatgatccaacttcatgtgacctgcagaggtctgctgccttgaggagtagacaggtagctgggctgttagtggctaagtccttttctcagaatatgtggaggctccttctacctttaacagtgcttttttgctttgtttgggaagtaacagagtagtcaagtgcatgaccctggagccagactgcctgagtttaaatcctgtttctctctttagaggtagttccttgggtgagttacttaacttgtctgtgcttcagtttccacatctgtgaaatgaagataccagtagttacctgagttttgttaccgatatcaaatgtgcttagatgagtgcttggcactgggtgctactcaagtatctgttaaatacttttatgggggatagaggacagatttaaatggtttcccatagccaacattctagctttccagaatatcagtattttgttgtggtagcggtggtcttttttcctaaagaaacagtgcttcgccagaagggagacattgttccctactggctccctacttccaccgtttctcccactcttctatataagtgccttagagaaactctggtcacccttttctgtggtctgcttagctccaacaagaatcatagaccaaaggttttgctgtcatcactttaaaaatagtgtaagttatttttttctttcctttttttaaatttttttttttttgagatggagcctcagtctatcgccaggctggagtgcagtggcgtgatctcggctcactgcagcctctgtctccctggttcaagtgattctcctgcctcagcctccccagtagctgggattacaggcatgtgccaccacgcccagctaatttttgtatttttagtagaaatggggtttcactgtgttgcccaggctggtctcgaactcctgacctcaggtgatctgcccgcctcggcctcctgaagtgctaggattacaggcatgagccaccacgcccagccagattattttttctttagtggaattcagccaattgaagcataacacatggcatgaacactctggaaaggtggctttggatctttccatttgttctctttagcgctgacttttgctttctagtccctgctagtgtgttggaatcttaccccatacagatgcaaactatgaaccaagaagtcagcatctatgcctagccaataattggttgttttctcgttcagagttcctcatgcccatggggtaaattcatatttcatccataagtgtgaccattgcagaagttctaggactgctactgtctgtatttttgtccttcagcatatcccagactaaacttactcttaaaatatgtttgtccaacctttggtttccttcctatggttgatattaagcctttcttctactcttagaagacaaaatggggagacaaaaaaggcaaccctgaaggtttttatcctttcagggtatctagcatttttctaatttagccctactgaagtttcttcagtaattaatcatctgtttttcagcctctaacctggctaatattatagcctacaattgtacttttaaagcccttttgtgactttgacatattgtgtctattgtgtatggaaaagtagcaggatcagtatgaagataatacagtatctcttaaaacaggcagccagcaaatgaactttctgcattggtcagaatttccatcatttcactgttaatgaggaaagtacagttctttagctaccatgaaagtcaaacatatcctaagccttttggaaaaagacatacatgttagaaaatctcaaatggatgagtcagcctgactgaccccacattgactccattttatatgctggccaaatcctgtttctgactttcctggcacagccctggacatgcttctgtatcataggacttgttccccagcgcctttgctacttccttcaggcacattcctaggaaagattggcagtggggtttgctctttgccagcactcctgccggtttgggggttatggatgccaggttgggctccaggcactctgctctccatttgtggaggcagggacggtaacagcacctgacaagtagggatgatcacattgtattcagaagcctggtggagctctataaacccaaatttctaacagtctccaatgtaatgccctgtaatagaagctgtccttaaccctcaatcatctgtattcagctagtataaaaatgcaaatctgctcttatgcctaaacagttaggagtagaggagacttggcttcctttggaaagtcaggatgatagcttcatcccattctggtttttgtgattaattgtgacctacaaaggggtttactactctagcaggaactttgaatttcctatatacatctctttctggttagcaggcagaggaaatatcgttgacttttggcttcctggcaaatgtctcatttgccttgtcatttgttgattccttttccctgatctctgtttggtgtgataatgtacagcaaagctgaaaaccgcagggctacatgtacacttgtaggtacctatgttgtgattgccaaaaggctcagaaagccagttttctagtgaaaatggctaacattctaagaaatgctttcactgagaaagagaacgggtcaggggaaggtggaacttaaaggaagatggagtgttcctgaattcagattcctgaattagccatttatagtttcatgggaagacaatgaaaaaaaaaaaaaagaaagaaagaaaagaaaagaaaagaaacaagcaaccccaaaggtttttatcctttcaggtatccaaacatctttattctagaaagtttctcctcgatggtaaaataaagctaggaccttatagcaagtctcagactcaccatggctgtttcttaacaccagtataccttaagcagtaggtatcaatttagtggaaatataagggtattgatatgtagtggaggctgctctgaacttggaggtggaaatactaagtttaaatcccagcttttcttttaacattgcaactttgagaagtcttttaaccattgtctcctgtttgtatcagcatgaggggatagataataaaacctgcctcacaggagtgttgtgagaattgagtgaaataatgtatgtgaaaataccaagtacaatgcttgcttagaaagtagaattttgttttgccatcccctcccccactatagttggcagggcagggggaggcagtatattcatccatcaatattatagatgcaattgttcccagatgttttgcttttaggcaaaaccttgtatagatgactgtataccctcttacagttgatgcttaataaaacaaaactaccatggttttataatggaatggtaagctcaaacattttgctggtagtataaaaaccaagtgcctgtgattacctatacattaactcctgaagaatcaattataatctcagcaaccttgctctttgaccattcattctaaagcttggcgaagttaatgagaacagataataggagtgctaatgcaattggaagacttttttttttttaaacaaagtaaggaagggatacatttttaaataaaacattgcattttggtaaaaaacacagattatgagaacacattgagttagaggaacatcatattgattccaagaacaaaaagcatggtggagaaattttgtaaccatgcaaatccagtgtgctctgttctcatgagttaaaaagaattttcctcctatagaaacttgttatttaaatgtgtgtcacatgtaaataacagtctaatgagagcaatatagagggagaaatatgtaagcaagggaaagtgggcattgttttgtttttttttttctccatctatttcaatacttgggtctttcctaacctatagtgtgtcctgtttctccctggctagatttcttaaagtttctgcctattcatcactcaagtacctatctcaagttgtagctacttttgtgtgcagggtgtaatagcagatgttctcctgatctagattttgttgctctgcctaactgcatgccatcatttgtttctccctttgtgatcttctactgtagtcaagtgtccctttagaacaaacttcatgggatggacatagcctaatgagctcattgctgatgaagtctttttttcctgtgcattggttagtgcagtaagcaaggctccttaactgcctgtcccagtgtactgaaaaataatagtgttctctcaccttaaactacaacttgtggtttttgcttattgcttctttagtctttgaccacatgcatgtttttacatagttgcagttattttattatattcctttttctgtcataaacactttccaaatgtgtttgtggtactcaaattatagcttagcagttaaataatttgatatattacagtttcccctcttgttaggtgtatccaattttggggtttgtttgttcgtttttgtttttttctgttgttgttgttgttgtttaagggaagcaccaaaataaacctctttttaaaattaattaattaatttttttgaggcagagtctcgctctttcgcccaggctggagtgcagtggcactatctcggctcactgcaagctccgcctcctgggttcatgccattctcctgcctcagcctcccgagtagctgggactacaggcgcctgccaccacgcccggctaattttttgtatttttagtagaaacggggtttcactgtgttagccgggatggtctcagtctcctgacctcgtgatccgcctgcctcggccttccaaagtgctgggattacaggcgtgagccaccgcgcccagcccaaaataaacatctttatatgtaatgttatttccctaagataaatttccaggagcttgatcccagggtaagaagctatgaacattttcatggctcttgccttataatgtcatattttgctttttaacctttaacaaagaacattcctatgcccttgctttcagatgggtcttttcttattgtgaggaaagggctaacgtaagtcccatctagaagtgactaacttgcctagttaaaactagaaggaaatatccactgtattgggctgtttactccataaaccctggcttggctacatgtgtggtatgtttcaagtctggcacaaagccaccaaacacatttttggtgagttggttttaacctgctcacatcagatatgaatgctgaagttggagctttcattattgtttttgtgctggtagaatgttgcagaaatacacagggctggctgtgtattcttagtcactttaaaaaaaatgtcctggtgtgtctagaatgatggtttctgttctttgcaaaaataaaaacatcaaacaagataaagtccgatgtagccaagaccctctacttgaaccttctgtcggtactgtttgtttaagtactgtaagtttccacggttcatgttatcttaggatatcttgtgaaacgaatccttgtggtccctactctgggctaacgctttgtgacttaactttttacagtgaacataaagattctgaaaagaaacacaaagagaaggagaagaccaaacacaaagatggaagctcagaaaagcataaagacaaacataaagacagagacaaggaaaaacgaaaagaggaaaaggtacagagttttctagtaggggaggaaggaacgtggatgcacttttgtttacctttgaaagcagatatcttaattgcatagtaagatcccttggtcttgaagtgaaaggtttcttgtcaggagaatttagagcaaactgtagtcttaaactataaaaactaagccttttaccaccatatgtttcacagtggcagatctgtccatatcattaccttttttactttatattgccaatgaatacattgagaatgcattagggaaaattaattgtttttgggagaaggcctaatgccttgatggtcttctgttcattaaaggttcttcccgagtgaaaatttagtgatgctggtgtcttttgtggcatttggttccagcataaccagtgcaagccttctaaaaatgactaggctcacccagctgagaatgaatagtactctgtatagttttaaaaagagattgtttttattttagctttgaaaaagtaatttttgtacttggtaaattcagatactatgaaataaggaatatggtgaagaagacatctcttcacccctgactcactgtctcccatccttctcagaggcaaccgctatactgattatgttttgtattcttccatagatactctgtatatctgtatgtgtgtgtgtatccctttgtgtgtatatatgaagatttttttgaaagataaattttctgacgaatctagaaagcaggaagtcaaaggggagggggtcatgagtatactttgcctaagtaatagaagacagggcatagactacttttttgtttgtttgttttttaaataaagatgggggtctcactgtgttggcggggctagtctcgaactcctggcctcaagcagtcctccaacctcatcttcccaaagtgttgggattacaggcatgagccatcacatctggcccagtttatatgttttgtttgtttggtttttgcttttgtttcctctctgcactgccaatggcaaattcttgagtagtggaatgtatttattggggaaaagagacctgccaccacttaaaagtaaaaagctgccatttttaagggaaacctttctcagtgagttggacagtttcacccagaagaattgttaaaaacgagttttggacacatttcaggacctttagttcatctgttcagttttggtaacataagagccagcttgtgatcatgatgtcccaggaactgatgctacatattctcaaaaagaggtttcttcaaatttagtcctttcaaggtactagttactgttgttttacttttcaggttcgagcctctggggatgcaaaaataaagaaggagaaggaaaatggcttctctaggtaagactttgctgctgcgtgggcttccctttctctgggtggacagcaggccagctgcctgtgttgtagtgttgtctgagttaacccaaaacccactgacctggccatcttgatggttcccagaagctcagcagtgagaagactcggtctaagccaacctgagcctttctacagtgccatatagtgagactgaccagcacattttccagaaggttatttcgaatagagaaggttgacaggagagatttttaaaaattgagatttgacttgcatatcacaaaatttgtattttaatggtatacagtgtaccatttttttttttttttttttttagtatattcacaaggtattgcagcctcttcactaattccagaacattttcatttctctaaaaagaaacttcatattcagtagcgattatggagttttctgaaaaatcacttagtctgatttcatcattagtaatattgggaggcttatatataaaagatcatttgacctacatgttagggatgagtgtagatttgggtagaattatgttatctcttttctagaaggagaggaaaatgcgcaaaatctagaggttacttcctatactgtttttacctttataattttgttttcctcagcctcaatttcctaaaataagcccagaggtcccctctagtttcgaaacaactagatgtttattgttacatattctcacttcactgaatgacagaaaggatttattagaaatggttgtaagtgtttgcattattgactgggacaaaacactttgagagttttgcttccttgaatctttgaactttcagtttcatttgttaaaatttttgacaattgtgcctggtactctggggtcctttagacaaggagaaaagcaggtgccctcttcaggcatgtttcataattgttctaggaatgcagaataatacaattcaggaagcattagagctgcaagctgccctaggaattttgatttctgagataaagtgactgaggaggcactgctgggctaatctctgccaagagactgccttggatttttattaaactgatatgaataaattttttggacttggtgcatagtcatgaattcattttcagactttttgggttagaagattaggaacacagccttctttgaggcagtggtctctatgttcactttgctggactccttgctggcttgtgtatatgtctttgtagagaatccagatgcttcactggaatacagttttcaggtaaattgttttaggacttcttccttcagacctaagtaacccttcccacagtttttgtcttcagtgtgacaaacttaggatctagcatttacttaactagttgggtaaatgataggctttctttccttctggaccctagggtctgtgtcagtattcaggcaggagggggaacagctgtagaagctggcatttggttagggtgctaaaataagttctttaaacattcaaattctatcacaagcaaggggacccagtatgctttttttggtcggaggtactcttgaaaccctgtgaatatactttgcagtggggtcgggattcttaatccttggatccctccacagggggcagctgcatgtaaggaggccatttcttgtactaagttaaggcagtgaggttctgaagagatgtgccaggccagggagcatcccatggctgcagtgattgctgggctctatggtgttttttacttgttccttctctgttttggttcaagatgtttgtctcaaaggattgtctttttatatttatattttgaaggtaagatcttaacaaatagtagtgagacactcttctgtatataaagtaaacctaagttaggacgttgaacaatgaatagatttggcataggataccttctgtttattctggtttaacacgtgccctacttttgttgtaatgttgtcagcttggttatttttccatgtagctagatatacatgtacgttattgccacatttttagaactttaaggtactaagttggggaaatcaatgtttattcctttccttgtaaaagctgtactttagcttttagagtactggaacaatcagttcagattgtggggtcaaatatatggtaggtttccatgtaaggcaagaaaacaccttaggtttatttctggagtggttcgtgccatgctggcaaagatagctaagaaatagtgagaaagaattctgacttagaataaagagtcttgatcccaaatcctgatattgcccattcacctgtacaatgaggacaaatactatctacttcacaggattgaagtgagaaaaagtgctcacagaacatcttcatgatatgtacgtggttatccttatttctgttagcttcttttcaacgaaatgacatattccttctttgtattaatagaatacagatgttctagcactctgaccagcaattttttttctctttagtccaccacaaattaaagatgaacctgaagatgatggctattttgttcctcctaaagaggatataaagccattaaagagacctcgagatgaggatgagtgagtattttcttaaaactttgacttttgaaaacaaaaaggaggagtttaaagaataaatgtgatgtgtttctttataatacatatagaaactgcattaattggcttttactcatttggaatttgtgattaatggactgatttctctgaactatgagaagtagagtttgctaaacaagtagtatacccaaggcttacatgaagattatataaatttttattactgaaaaggcaatagatatttattgtagaaatttcaaataatacagaattcatgaagaataaattatttaagttacttaaaatttcttattgcctaccacagataacttaaagcagtttctcttagacctattcctgtcagacattctaagtgaagtttcagtgtgtaaaaataataaaactgctcataaaacggtcgaggcttacatgtatctctttccccagattcaatgagattaaattatattcattattttcactcttatatagcttactatgctattgttatagtagaaattggatggaaagggagaagggaaatacttagtgaactcatttgtattcattcaatatagaatttctttcctccacattccagtgagttactgctatgtggtagctagtgtgctgtgtgtttggttcccaaactttcatcttttatttttatttattttattttattttttttcccagactttcatctgataatgatatttatttctgcatatatccccccaccctattttgcttccaggccggtgtaagtggtttgttttgttctatatagggctataactattactctttggtctgaccttcattattttctctatttctgttagtcttgaccgtagaatgcccagccaagaataacagtgattactcttgccatggaggcatccaagagtttgtaggtctcctatgagtgagaactcctgaatcataattatgttaactgtgtattcatgttcccctttctagtgctgattataaacctaagaaaattaaaacagaagataccaagaaggagaagaaaagaaaactagaagaagaagaggttagtaaagagacttaggtcctttggggcttgagtttggaagtgggagttttccagtaagcaacttcttaagacaaatgagttttagatatttattggcttgttataacattagggaaaacaaatttaataagtggtggctgtggcactggtagttttaagatctctgtgaatccccacagtgtcttaagttaaccacaaccagcagtgattctgctctcagccttcctgggtgtctgtctacccacagctaggctgccaacagatgttcttccaaaaactatgtcatcttcatatatacagaggcagtgttaacaagaaaccacattttggcttataaccctgaagaaatttccctaagaattttttgctgatcattcactttaggtaaccattcctatctaaagttctttaatgggtacccctttgacatataattgacacccaaactctttactgcagctcctcccaatctggcccctgcatcttgtgtctctcttcatcttgtgcctcttctctagcttacttgtaccagtcacactagcctcctttgtttcttttccacaccagattctttcaaacttccgagctttacgtagcacctgctgttcctctatctggaacacacatgctcccttctttatccttttggcctataaccttcctcaaaaaactcagttccgtttaaatgctttcctaaatgttcttgttgatgcttgtggtagattgaaaatagaatcatatgcttcctccttttgacacttttgagttcttgtaccaaaaaattgttagcaggtaattcaagaaaagatgtcagaaattcacaggggtcttaatgatgccctcccctaagacaagaaggggttgggtgagttcttagctcttatgctacatttgaggttagccactgtcatgggcaaaatgggatcacaaatgtaaagtggacagtttgaagtaccagcagtaaagagaatgatagtgaaggggcagggagtcttaagaggataatctatcataatagaatgatgttaataatcacaattaaatgtaataggtgcttaccatgtgccaggcactcttctatatatgtatcatttcatttaatccttacaacctgaataggttgttacatccctattatcatctccattttgcagatgcagaaatagagtatagaaatatttaatcatttgcctgaggtcacatagctactaaggtggaaaagccagcatttgatcccatgcagtctgacttcagtgccagcacaccagctactatattatcctacctcccctgggactttgctgatgctctaattctgcaaggagggagaagaaaggtctttaatgaaatcatatgaagaccattagtgagtgagttgagccatagagagatgatcaggtcctgaatttagaaggttgccgtttttttgacaactagtctattcttggccgaagttcaaattaataagcactaattcaaggaattgagagtgaaatgttaagtagtgattatggtagccaatcactccacttgcatataccaaatcagtacagactagtcagtaaaggaatataaaacttgagttctccaagtgtttttttttttatgtttatattgcatttatgcaaaaataatactctgagtttgttaaaccattgggaaaaaagaacagttgacttcatttgttattattctatttagcagccctaccacatagggggaaaaatgctggctgaaagactgaattaatacaatcttactgtggcagggaccccagatggcagaatctgtcattaaacctcactcgccaactatagtttttttgttttttgtttttttctcttgtttttgagaattgttctgaggtctcttagtgactgacaccccaatttgaggcttgaaaacatacaatgtagccagtagtttcctgatgggaccagctggatgcctgctcagaagctgtttagagtatcttcactgaaaaacatttccctttcctgtggtgtgtttcaccctaaatagtaaacattatctgaattaatgtgatcctgtagtaccttctcccaaacatacccacatatttatattctccgtgcctgttttaaaatatggatggtactgtaagctttcctcttttttctattcctatcttgattgccatcctattatgaggatctaaaatgtttattccagttattcccataagtcacattctgttatttttctcataaagttaggctcttatcatagttaataacagctatatgaccttgatcaagtgacaaaatatgtttcaaagtccttgattgtaactggaagtggttaaatgaacccatccatacactttccagctgtgccactctttaattgattttaagatggttcaaaaccacctttcattgctatataaaacttgttgaataaagactgaataagtagttaaattatgttgaataggcaggacaaaggaaaatattcttcaaaagagttcagattctgagtgggatcttcacttgttgaatattacatttttgtttgggttttgtgtgtatgttttgagattcatctcctgtattggtgaattgtgcctgtttaggtttgatgcccgtttattgtgtcactgtgatcagctcatttacattcagagttcaaagaagagccataaagaaataccaccataggaattggtgtcattttagaacctatcaaatacttgcttactgcatcatgactttgtgtatacaagcagcagcgatagtactatactccactaaatcaactgggaattttctttcatcctgaatactaaatatctaatgcaaagccccgtctagccgttatttgattgtactggaagaggtttaaagatgagtaggattaaacataagtgaggaaaatacactcggattactctctagagcagtacttttccaaactcctttgaggttaaaaaaaaaaaagtttcccagtctcttcccctgcagagtgttttttaactactttctcaagtagttgtttgtcaggaaattttaggaaatactgctgtagaacagagcaccagtacattgttattcatctgtcaaatgagaggagtactaagatcttctttagttctaatactctatgattacaatttttcttcctcatggctcccaaaaactgcctccagaagtgtgatcagtctttatttaagtgctttctcaccatgtttctttgtaggatggtaaattgaaaaaacccaagaataaagataaagataaaaaagttcctgagccagataacaagaaaaagaagccgaagaaagaagaggaacagaagtggaaatggtaacatctcagcactgggttaaaatgccaccttttttattgcatatccttacgaagcaagagtattgagttattaaaattaatatcctgatatttggggggaaatactttaaacaatttctctagagtaactttctgaagtaagttttccaacttctagtgaaatcattaactggttctaaatctattggatctcaaactggtttccaccactgtgaacagaatggactgtagaagcagacctatgtataggtgggaatttagcatacgaagagagtacagatgcatttaaaaccatacggaaaggacagattattatgtaagtcgtgttgggaaaactgcctgttcaacaacagaagaaacctcaacaagaaaacgtgggtgaatatttttataattgtgcagtagtgaagatcctttgaagcaagacataaccagagccataaggaaaggtgttttacatttgatacatcaaagttcaatttatggcaggtggacaccttcatgccatttaaaaaaaaaaaaaaaactcaaggcaaaatatttgcaatacaaagggctgatattcctaatatgaaaaaaagctcttttaaaacaaatatgaaaggaatgatctaatcagaatgtgaggaacagtcagtttagtaaaatagttaataagcatctaaaaatgtgatcaacttcataagtaatcaaagatgcaaaaaaaatgataaatctttttgtttaatgcctctcagattgggaaagattaataagtgaaaatatctagagttgcaaatgtaagaaaacaggcattcgccttccctataggagtgaaaattcagtctttatgaaggacagtttagtcatagctggttgctcttgagaagtgtatttaggtggagaacttttctacttttgctgtttagaatcttgaaataaacatgtttttaaaaaatacttatttctgttaacatgttctatttaactactataccagcagtacatgattttgtgtttatgatgaaaaaactcaaatgattgacagatttaatagttagaataaaaatcaaagtcacctttacctgtcttctcccattctcattttcctttccagctttccagctttgaggtaatcactgttcataatttgatgtatagccttccaaacctgtttatgtgcctttatggcttttgtaatttagaactttgatgtccacagcacctctgaggaaagggagaaagagcactgaccaggaaggtggcagagggaaggagagccacagtggcagaaatgtggccacacggtgacagctatgtgattcgcatgttgctatggcatcatgggattaaatgggaagtatagaaaaggaatatcacagagcagagcaaccctgcctctttctagaggtcagagtcagaaagtaaaaggccaggcacagtggctcgtatctgtaatcccagcactttgggaggccgaggctggtggatcacctgaggtcaggagttcgagaccaacctggccaacatggcgaaacctcatctctgctaaaattacaaaaattagccgggcgtggtggtgcgcacctgtagtcccagctacttgggaagttgaggcaggagaattgcttgaacctgggaggcggaggttgcagtgagctgagatcacgccaccgcactccagcctgggcgacagagcgagactctgtctcaaaaaaaaaaaaaagaaaaaaaaccccacatgggtttattttcctcatttttatttcacttttcttaagaactaatacattttcagtgatcttgacctttaagaaaatgatttttagaaataaagtgattgtgtaaattagaggttattattgggagttaagagaatggtaggttagtaattcatcagtcagggttctgtggtagttactcaataaatgcttgttaaatgaacaaatacatttccttatcaggagctccctgctgtctcccctttacttcggagctttggctctttttgggatccaggcaagtgcgctgggtccagccttgtatgtgtagaattaggtgcccttgaggggtttaggagcctaattttgcttttgtggttgaaatccttatcagtgttgccacacattcactctgacagaccatgacttttggtttttattcttattttgggttaaaggggaactggctagtctttaactaaaagttgttttttgaggaatgagcagactttgctacagcttctaacgcatgcatttctcaggtgtgatggttaaaccttgcacattcttttcaagcacagtgcttgaatggcacaccgagtttttggtgttgaaaatatgaatgaagagcctcttaactgatagctagaggctgtgtatcatactctgaagtcagttatccagtcctcagtgactgccactgatgacctagtcggggagttaaatggcagatacccttatttttactattccttatgctatcctactaaaagaagtacacactttacaagcttgacaaatttgcagatctttttcttccctcgtaagtccgcagacctgtttgtctttaccagaaaaaaccacttactctgatctttatctccctcctttggtaattgttcagttggaaaaggtccaggtccctcagggtttctttgctatatcacgttatctccatagaaacattgttataagtggtggcagtgtgcttgggttcatacatgaaatcctgtttatcccagatgtcctgatttttaactgttggccattgtagctgaacagggtttcagcactgttgggttaattaagtacacttttgtgtcagggctgacctgggaatataagttgccagttaattctcaacagatgattcttcataaagaattacctggcgagtttattgcaggtgttaggtgtgactttaaatggagttttcaatctcttagcaaaggtaaaatgctgtgatgagtcaggactataatgttttaaggaattagtgttgcaagaccaagactcataaatatatggtcaatgatagtggtaagaaatttatggaatatggattattgacattttgctcaaaccagaaaaacttcccttaatttcaaggattagcattcagaagctacagcatctgacctttatttctaaatttaaaaaaattaaatatgagttttatagcatactgtgaagtgcttgttaactgcaagggaacttgatatcaaacagcacatggagtttactttcctgtctttatatttctagcacttttccacctttcccccttcaagcaaattttattattaaattggtacttgattattcaagtcaagctgccaaagggaagccatttcgatgtctaagtacatgtttttgtttgtttatttgtttttaaattgcggggggcggatatatgcactcatggggaggctaaaaggacagaactgtttgcttttatttgtataataatagctgtcagcccagtcacatgagcttactgaaacagatattctgtctttctgtttaaactgaagtttagtgttgtgatttgctgaatctcttaatttgcttaaatggtaaagaagttgctgtgggtcttcaggatacacatgttgaaataggagtcgtaaaaacagtttggagtcttgatttaaaaacactgtagggccgggcgtggtggctcacgcctgtaatcccagcactttggaaggccgaagcgggcagatcacgaggtcagtagatcgagaccatcctggctaacatggtgaaaccctgtctctgctaaaaatacaaaaacaaaattagctgggcgtggtggcgggcacctgtcgtccccaggtactcaggaggctgaggcgcgagaatggtgtgaaccctggaggtggagcttgcagtgagcggagatcacgcgactgcactccagcctgggcgacagagcgagactctgtctcaaaaaataaataaataaataaaaacactgtagtcgatgagaagaatggtgccaaagtcccaggataagggaaagggtggcgttcggaatctcctcacggttactctgtgactgctgcagacaggctccttgcagatgctctcatacacctacatatatatatattttctctatttggagagtaatagactgtaggattgggtggtttcctgcattgagatccttctattaatatatcaatgactctgccaatttcatacctgaaaaagtggtaggttagttatagaagatctttaatattcctttgaggtctaagattctgttaaatatttttgtttaaattgtgtaaaatacatatgacataacatttatcatcttaaccatttttaagtgtacaattcggtggcattaagtacattcatattgttgtgcaccatcaccatctccagaactctacatcttgcaaaactgaaactctgtagttattaacaattccccacttctctgttgccccagttcttttttttttttttttttttttgagacagagtctcgctctgtcgcccaggttggagtgcagtggtgtgatctcagttcactgcaaccttcgcctcctgggttcaagcaattctcctgcctcagcctcccaagtagctgggattacaggctcccaccaccattcccggctaattttttatatttttggtagagacggggtttcgccatgttggccaggctggtctcaaactccagacctcagatgatctgcccgccttggcctcccaaagtgctgggattacaggcgtgagccaccgtgcccagcctattcccccagttcttggtaagcaccattctactttctgtctctatgaatttgactactttaggtaccttgtattaatagtcatacagtatttgtcctttgtgactgactcatttcacttaacagaatgtcaacgctcgtccatattgtagcatgtttcagaattttctgacttttaaaggctaaataatattccattgtttgtcctgcattttgtttattcattcatcttttgatggacatgggttatttctgcctttggctgttgcagatagtgctgctgtgaaacattcgtgtacaagtatttgtttgaatattgagtatattcctgggaatggaattgctgggtcatgtggcatttctgtgcttaactttttgaggaactgccatactatcttttccacattggctgcacctttttacgttcctaccaggaccacacgagggtgctagcttccctacaccttcaccaacacttgttattttttgttttattgccatccttatgagtatgaatggtatctcattgtggttttgattggtattttcctaatgattattgatgttgcatatttttgcaggtgcttattggccacttgtatatcttctttagaaaaatgaccattcaagttctttgccccacccccacgtgtttttttttgtttttgagatggagtcttgctctgtcgcccaggctggagtgcagtggcgcaatcttggctcactgcaacatctgcctcccaggttcaagtgattctcatgcctcagcctcctgagtagctgagattacaggcgtgcaccaccacgcctggctaattttttgaatttttaatagatacagagttttgccatgttggccaggctggtctcgaactcctgacctcaagtgatccctccgcccgctttggcctcccaaagtattgggattacaggcgtgagccactgcgcccagcccctatttttaattttatcttttttttcccctccaccttaagactgagactttgcccatttttttaattgggttgtttattgagatgtaggagctgtttatatattttgtatgttaaccctttatcagatacatgatttacaaatattttctcctattctgtgagttgtctttcactctcttgaagtgtcctttgatgcacagaagtttttaagttcagtgaagttcagtttatttatttattgagacagagtgtctctctgttgcccaggctggagtgcagtcacgtgatctcggctcactgcaaccttcacctcccaggttcaaacgattcttgtgtctcagtctcctgagtagctgggattacaggcgtatgcccccatgcctggataatttttgtatttttagtagagacgggggggtctcgccatgttggccaggctggtctcgaactcttgtcctcaagtgatccgcccaccccagcctcccaaagtgcggagattacaggtgtgaggtactctgcccagctgcaattcatttattctttttgttacctgtgttttacgtgtcatatccaataaatcactgtcaaatccaatattgtgaagcttttcccctatgttgtcttctaagagttttatatttttgctcttatatttaggtctttgatccattttgaattaatttttgtgtataatgtaaagacccagtttgattattttgccaacactattgttgaaaaaactgttctttctccattgaatggtcttaagcatcttgttgtaaatcatttgaccatatatgttgactttggttttatagtaataccattgttacaatatggtttgatacatgtaatttttatttgatgtttctgaactttgtttaaaatattggacttgttccatggctgaatgattgataataaaataataaataaaatattgtacttggaaagtaaatatgagggtagtaagttagttatctattcgagtaaaagaaacttgaggcatagccagttgcaatttgtgagcctgagttggatcctggtctataaaataaatttagataaaatagggaagtttttaatatggactgggaattagaattatactaggagattattttgttagatgtgataatagttttgtggttatgtggaagaatattatttttatagagatacttgctgaaatatttagtggtgaagtatcaaatctgcaaccaactttgaaaatggttcggccaaaataggaaatgtagcaaattattaaccttttttttttttttttttttttgagatggagtctcactctgttgcccaggctggagtgcagtggcacaatcttggctcactgcaacctctgcctcctgggttcaagcaattctcgtgcctcagcctcctgagcagctgggactacaggtgcgcgccaccatgcccagctaatttttgtatttttagtagagacggagtttcaccacattgcccaggctcctgacctggatcacgacctcctgacctcgtgatctgcccgcctcggcctcccaaagtgctgggattacaggcgtatatggtgtttattgtattactcatttttttcttatgttcgaccattttaaaaatacattttcaaaaagttgttcccactgagctttagattcacttatcagtgtttgctagatagttccaggtaatgcgtaagtaccttaaactcaacatgccccagttaagctatcatttcctagtcgtcttcctttatgtcctttctcatagggttgttttctcctctaccttccatctgacgtcaccactctgaggaggccttttccttacaaacaatgtaaacaatccctctgtcatgtatgccattgtggtaaaacaactgtttacattttcaagtccctcacttgttactgagctccttcattgttgatctcttctgtccagtattcttaaactgagctgttgaaatgtattttcctttattcaccacagtatttcatcttacttgtgagcgttggctttttcaaaatgagagacactggttcttttgatccaggccttgaatgtgaggcccagaagtcattccagagcactaatcagttgagcggataattatttggcatttaatcagtgatgatccccatgttagacaaggcgatcactaaatgaggctgtgctttgtcttttaaaggtgggaagaagagcgctatcctgaaggcatcaagtggaaattcctagaacataaaggtccagtatttgccccaccatatgagcctcttccagagaatgtcaagttttattatgatggtgagttgtttcaaggttcttgattcttggccaggaaaagaaatctgcttctatttagggatagaaaacaaggaaggatcctatgtaatagataatcctttttatttcattttgttttattgccatgcaattttgaggaaggggcatcaggtgttaactcttaaaggctcatttgctgctgaaaaagtgccatggaaaaggggctattcatgtcttccctacatagtccaaaaaaggtttgtcaacatggctaacagtgtgtggtccacaagctgaaggttttgatctgaacttcatttctagggagcaactcttcgcaagagttattagaaaagcctcacttgaatggtagtattttatgttagcaatataacaatgcaatcggacaagctgctcatcactagaaacagtattagtatatggtcgaggattaatagtctgccatccatctctagatagggctggtaggcatctgtcacctattctgtgtagcataacactatgcctttgatatatgtgcaatcaagtctgatgagctgctttaaagaaatgccctgcctgggtctcttagaaccctcagaattgtcccttatctgtcgttggtatttgtatccttgggtttgaaggatttgagggtagcctttgacatgcctcctgttggcagtgtagcagtatgtagatggtaataactgattttcttcattccatgagttttatccagaaatggttagagcattgttcctcatacccttatgtgcttatgactcaccaaagtggatctgagcccatttaacagttgtggggtgggcttcttttccctttccccaccgtccctcttcttctttcccctttcccaaccatccttccctcttctgtcccctttcctgacagtcccccttctcctttccccagcattcctcttccacctccacttgtcttaccaccgtcttttggccactgttatttcaccaccccatttctccaccatttttcccaccctcagccccccactgttttcttctcacccatcccaccgcccgcactgaaaagaaaaagttctggggtgggattgagtacttctgaaccaagtggtctgctgaccaaactttgagaaacactgggcaggataactgctgaaaagcatcagtggtgaacactcaggcattctggtgcatctctcttcccaccagtagtggccttaggtccaccaatgcttgtaggcctaggtagtagtttacactaaagggctgggtctgcaactgaagaaagtgccaaacttggcaagctgaaatttgttttttaaaatgccatatttattagccaagtgtggtggtgcacgcctgtagtcccagctactcgggaggctaaggtgggaggattgcttgagtccaggaggcagagattgcagtgagcctagatcgtgccactcccctccagcctgtgtgacagagtgagaccctgtctcaaaaaataaaataataaataaataaataaaacatatttattgaatgtatttgtggtcagacaccaagacccagcagtggatagtactactgacttagaccctgatcttggggagtttgcagcctaacaggactccataatctcagaggcaaatgcttatgttatgtaaacattttgacctgttgaccagagagcctaagacagttctttcagccctcacgctggtcattcctggagactcttaactataactcaaagccaaaactcctaattaagagaaagggcctagaaccttgaagagcaccatctcaaagcgtaggtattccgtaggcctggtctggacttaccaagagctttaggatgctcagctggtaaagcctcactttgaggttcaaagtgatgggagggaaagctagattccctagtcctgtggtttctcttccttttcaagataggaagcagaggcctggtctagttcacaggttgccatagtcctttcctcccattcttgcccagtcctcctttacaggatcctgctttagggctccagcattttctcagctggtcctctgctgggatttcttctctttgattgtgtgaactcttactctgcagtaagtcaagaagtcatatttgactttacttcaaactgatacagtaagtgctgcctactctctggggaggagaattcttagactcctttagaacttgccagggaggtggggcatgggctagctgaagcagtgaattactgccttctctgaggaccttcagtttacagctttgattcagcagtttccttttcctggagctcagccttttccacaaagtgttaacattgccaggaaccttccagtcatcctcccactactctgatgcagggagccatcatttcatcttttgacagctcatctaaaataggaggagtcacagttgcttctccctctattaggacagaattcagtaaaacagcccaaaatctcattttttttaaatttatttttatatttatttatttgagacagagtcacactctgtcacccaggctggagtgcagtggcacaatcttggctcactgcagcctccacctccaaggttcaaacgattctcatgcctcagcctcccaagtagctgaaattaacaggcacgtgccaccacacctaagttttgtatttttaatagagacagggttttaccatgttggtcaagctggtctggaactcctgacctgaagtgatccttgcaccgcctcctaaagtgctgggattacagatgtgaaccaccatgctcagccacatttttttttaaatggtgttaacagtttacatttttttcttgccattttatttcatttattttattcctaatgacttaatgttttcctttatattggaaacatgttacagttttctaaagaagttcagggaatcttttaatacacagcctatcttccccgaagtgtctttcttccaaagcagaagcttgggggttgatgggggcagctgcgccacctgttggccttttaagttaatggcgtccaaagtgggttctttctattataactgtttcaatattgtgctacagttctctacacccctgcaaagtcagattgcatatcattatgagataagatgtcttctgagttttgaaataaatggatttctggttaaattttagttttctataaagaatgtgggcagccttggtgaattattaatacctgtgtaatagtaaggtggtggaattatagttaacctcattttaagtatagccaaatgctcttagtatagcatggattggttcgaggtgatgttgtaaagttggatttttaagaaagaatggaaattggcactaagagtactgtcaaaagcatttgtttgaaaagtggattaaattcccaagtacttttctttcattgctttattaactaaatcaggtatataaaacccataggccctattcagattttctttaccagttagcagctttcattgtgaaaacatctgagtccctttagacagctttttgtttatttgagacagtctcagtctgttgcccaggctgaagtgcagtggcgtgatcttggctcactgcaacccctgcctcctgggttcaagcgattctcatgcctcagcctcctgagtagctggagttacaggctcccaccaccacgcccggctaattttttatatttttagtagagatgggttttcgccatgttggccaggctgatctggaactcctgacctcaagtgatctgcctgcctcagcctcccaaagtgctgggattacaggcatgagccactgctcccagcccctttagacagcttttacataaacaattggatacaccaggaaccccagtcatcccttgtgctgtggatgcatcctggttccctgaaagaggcagcatcatggtacccatgttccagagcagtgtgtcgcaaactctagtgtgcatccaagtcttgttaaaaatgcaatttctgtataggattcagtaggtctaggagggggcctgggattctgcatttctaaactcccacatgatgccaatgctgctggtctgtgaaccacttgttgaatagcaaagttctagaagaaggtcttattaggcttttcatatgggaaatctgggcttgcctagtatggatatatatttttttattcatattccacccacctaactttgaagaagaaagatgcctatttcttttccccacaattcctttcttccactccctgccctatcccttcctccccttcttgaacagaggctgcttagcttagcagtggcaggagtccctctgaggatttgatttttaaaaaccattgaagaggtgtaaaggaccctgcttgctgaaaggaaaaggaagagtgactgggcctcccccaggtcatccctgtcctgagcaggcacctgggaacaattaactggcatagtctccagagaatgacccaggtaaatatatgctaaagagaaggagaatttgtacaagtagatataaatcagtatgttgtctttgttgttgttgctactatgtgtcaccagacctttatataccatgagaaggcaaaccattattaaagagaattcgctagccctgggtatttatgcttagaacatgaatactatacctcactttttggaaccacttttttctctaggtaaagtcatgaagctgagccccaaagcagaggaagtagctacgttctttgcaaaaatgctcgaccatgaatatactaccaaggaaatatttaggaaaaatttctttaaagactggagaaaggtactgtagcccatgtgttaatatcctagtaccttgcaaaacaatcaagtactaagtaataaattatcattttgcaaaacatttcctgatgtaaaatttgagttgtatggattttgttgtatttaaacttgcgtattttttgtcttcatttactatattatgtagggtttctgtccaacaagagtacttgtatatctttgctattggctctcatgtgatggcaggtaggtgggggttatcagattaggccaaacagaaaacctcaactccagttgcgcacaggaaagtttgtcgctgcaggactgccccgtgtctgctgttgcaaagagaaatgttaatctgatgtccctctcgctgttaattcttgctcatttattttaggtactttctactcttgaaaccacatatactatatttgcctaggtgattttttaaaatctcattattctcaatttggataatgtggacagaggcagcagtaaagtttacttcctgaactagctcagaaaaagcagacttaataaatgaatagaataggggtaatgtttccaagagagaatcagtatgggatttcaaacttgtattcataatgcctgggggctgtgtgccacggagtctaagaaaccacataagaattcatttttttccatgataagtcattttaaaacattttaatattagtaagtacatattttataataaagtaatacaactgtatttttttgttttttcaaaattcattaattgagattggctacttccagaaacctttgactgaaaaaatggtgcttgggtgtatttgcaaagaaacccaaggacttattagtgtattttcgttgtttttctttcatctccccattttcttttgactaggaaatgactaatgaagagaagaatattatcaccaacctaagcaaatgtgattttacccagatgagccagtatttcaaagcccagacggaagctcggaaacagatgagcaaggaagagaaactggtactacagaatttattaaacctctggagaattctggaattgtgattggttcatttaactttcttcttggttcttatgacacaacattaacatcagtaatttcacatcattctatgctaaagacttagagttctcaaagtctaaattttcttaaaggttttagttagactgaaaattgtgaacaagtactttgctcagtagctctgtacaggaatcttggtgcttcagtgacctaaaaaccagtcagtaactccagccaataatatagtaattaaggatgggcagacctgtcccacagtggctactggatattaaggatttaagacagatgaaatcatattggccatgtacctccctgctctttgatctattttactctggaatcttgtgatgctcatccatctccatcttccagccttggccatcctcattactgaaggatctttctggtatccagctgggatgtcatttttcttctacaggctgcctgtttttgtaaaaaaaaaaaaaaaaaatttattggaaccagctgcctctacttgtctacatattatctacggctgtgtttatgcaacaatgacagagatgagtagttgcaaaagagagtagttgcaaaagagactgtgtggcactcaagcctaaaatattttctatctagaaaaagttgtcagcccctgaactaaaggaatccaggctagaatttcatttttaccaatcggaagtccagaagttaaggattttaaggaattctttgcacttcaaattcctgtagtttcagtattttaaaggacttgcgtgtttacgtaattcagaccattgtattgatataactcattgtttcatggtacttatttggtcactagtttaaaaattaatgcattactataagaatgttaattgcatcagactttgtgtctcaggtaaatcttatcctcaatattccaagttagtgaaatttagtatattatttacttcaggggcattttgaaacttaaaagatcactttggagctttgttcttagaatattgatccaaagatagattttataaacatccccttgtcagagcctctgccaaggacacctgctgccagcaaggtctgaatctgttcccacccacaaggcagcacaacttagttaaactgaatcaataagtatataaaacgcagagtcaatagagggtaaggaggctcaaaatctcccccaccatccctcacctttttggagcaaggatcatagtatagagtgtatatacctgtatacctacaaaaaaattagtgacagatctgtctgagcttaaaaacccacgtttttaagctgtttaactgctgtttaattaaatggcttgagctattcttttatgaggctctatcagagactcttctccatttcctgttttgatagtactcagtaaaacagtatgaatttttaaagtacatttaaaaacacccaaataacatttacaaacatatatcctttaagacacaagaatcagttttgaatctagttgaaatcaatccttataggcagatctttttggggaattttatgatatttaagtttgagaaaaccactagaggttttcctttatttgaatttattttttagtgatttttcagactttcctctaccttgacttagtctcccacaagagataaaatgcattagtagagaacagcaatctgaatctattttgagtactttcttgctgtcttccagaaaatcaaagaggagaatgaaaaattactgaaagaatatggattctgtattatggataaccacaaagagaggattgctaacttcaagatagagcctcctggacttttccgtggccgcggcaaccaccccaagatgggcatgctgaagagacgaatcatgcccgaggatataatcatcaactgtagcaagtgagctcgcacttcatcctatgggccaaaaagggggtggagggcgtcctttattgtacttgggaatatttcccaggttacacaggactgtttgggaagggagatacttaagagcaggacagtatttcatgcgtaggtctccagatgtttttgaggtacagttgtctcccctcatccacaggggatatgttccaagacccccagtggatgcctgcaacttcgacccaattgctgtcacttggaacacatttctgttgatgtcttccacccccaaatttaatgtcttttccatgtttattaagtacttatcacatagagtggctataacttttgcagtctgaggcacaacagcaaaactagcacgactttctttttccttcttcacaatttcacagatggaaggttaattcttaccttagatcttagcaacttcaccatacagttttttttattaagtcgataatttccaccttttcatttaaagcactctgtgcagcttctgtatggcatatccaaattgccaacatcaccactttcacactttggggcctttattaagtaaaagaaggattacttgaacacaagcaatgtaaaaccattaaagtcaacctgataaataaggcagctactaggttacccatgggcaagtgacatatacagcatggtatgttgtatatatggttcacgcatcccaggtgggactacaagagatttcatcatgctcctcagaatgatgtgcaatttaaaacttacaaaatgtttatttctggaattttgtattgaatattttcggatgacagttggctgagggtaagtaaaaccatgcataaggtgggactactgtattgactgttaagaaggaaacttggaaaattatgctcagcagataggtccacttggggtcatgaaaggtgaaattattcctcacatcttatttcactatcctcgtgctctgttatttccagagatgccaaggttccttctcctcctccaggacataagtggaaagaagtccggcatgataacaaggttacttggctggtttcctggacagagaacatccaaggttccattaaatacatcatgcttaaccctagttcacgaatcaaggtaaggggatagttgagagctgcactggttcatggtgctgataacctttttttgttgaaatgtaacgttctcgtcctctagaatcactttgacaaattaaaaatcctccccattgaaagaaggcaagtactttcatagttagcattatggtgatcttcctacagtgcctccatttttttggtcacattgtaatcttatttattaattcacaaatatttactgaaatcccaaatgtgccccacacagtatacatttgatgctaggaattatgttggtaaacaagatagacgtaggccctgccttcatattgcttaacgtccagtggtcagaatgtgttgaagtatggtgattgtatattggcctctgcagatgtcttctacttcctcacctctcttggttatgagaagggaatgtagtttctgtatatcctgaaacaagttgtaaaatctaatgtcttacatacttctggcttcctgcagtctcatctgggtaggttcaccagggccaaatgaaatgtgtgtgaaagcacatcataaaactgtgttacatacctatgcactgttatttattgatagtgttattgcaaggagataactgccttgggggaaatcagtttttgtttgccagatagctatgtatatctagctttggagagtcccacgaacttcttccctccaacatactatgaaatataaacctaacagagacaaaaacacagtcaaggaattagttctatgtagactgttaactgttttatgtgcaggagacctgggactaaagaccttcttgatcctcgttcataggttataacatctgttaaaatgtgaaagccacagctgaaaaggctatgtgaataggcaagactaaactgtacattttctggcttgtagccctgtgttcttctgtatatcactacttttctaatgaaaaatacctgtttatatattttctccaattataaaatatacttttctggctgggtgtggtggctcaagcctgtaatcccagcactttgggaggccgagatgggcggatcacctgaggtcaggagttcgagaccagcctggacaacatggcgaaaccctgtctctactaaaaatacaaaaattagccaggcgtggtagtgggtgcctgtaatcccatctacttgggaggcggaggcaggagaatcgcttgaacctgggaggcagaggtcgcagtgagctgagatcacgccactgcactccagcctgggcaagagacttagactctgtctcaaataaataactaaatacataaataaaaataaaatgtagtttttgtagtttagataagtacaaaatcagaaagcgaacacttatgttgagcagactagtcatttaaagaaacatgtattcctcttctgaagtatcgcaaagctgtatatatggctacaaaagcagaaaaataatagttttagcccttaaggaacttataggctggtgggcaaatcaggtaagaattcagttgtattagaagaaagataaaagtaaaatgcattagataaacagaggagttatttgcagcaccttagagatcaacaataactttatgaagaaaagtaggttatggttgggtcttaaaagtagtatttcaaacaagagagaactgtgtcgtggacaaaggggagggtggtaagcagagtatgttgaggataggggttgagaaaaggtgtgataaaaagaattatcaagtggtgacagttgcacaacattgtggatatactactaaatgtcactagtggtaaatggtatcaatgcatattttaccacaacttaaaaatgatcaaaataacagagttactattaaaaacatttgcacataagttaacatttggatcttctaagcataccgcacatacatatactaatgccaccatttatagatgagtaaatttagtctctgggaggcccaaaaatttgcccaagattcagtggctagtaactctaacttagatcttcttagaatgtaacttagatcttcagtctctgcatgctttcctgtgacatccactgctaaatgtggccagctttaaatgccatgttaaagagactgagcccttaaaggactttgaacagtggagtgtcttgaacacagcttcacttcagcaagatttacaggcattatatgtaaatcacatcagtaaatatgaactgttataaatgctgcaaaggaaaaagtacagggtgccatctgagagtataccagggtacctgatccagcctctggggttcagggatggcctttctgaagaggtaacatttaaaggataatgtaaagaaaaaatttttttaaattagtacctgaagatctggctggcctcactatatagcttcctctcctgcctctttcttccctcagaacgaccaagctcttgctcacctctgggatttcaaaaggctactttattttctctattagaaacacccattctcctattctttccagggatacaatcctattcatcctgtaaatctcatcttaaatgttaactcttcagaaaggccatccctgaatcctagaggctggatcaggtaccccggtatactctcagatggcaccctgtacttttcctttgcagcatttacagcagtgtaaatctactggtgtgatttacatataatgcctgtaaatcttgctgaaatgaagctatgttcaagacaactccactgttcaaagtcctttaagggctcagtctctttaacatggcatttaaagctggccacatttagcagtggatgtcacaggagagcatgaggagcatacgctctaagaagattgaagagttactagctgttggatcttgggcaagttttagggcctttaagtttaaaaggaagccaccaacctgggatttaaagagggaaatgacaccagatttgtattttggaaactcgttacataattgatcattctgactgctgctctgcggagactggattggacacaaacaagaagtagagagatcaatgggaagctgttgcatactccaggcaagaaacagcgatgacttaagacaaatgatggcaatggggatggagagaggtgacagatacataatgtatgctgagtacttgtacaggtaaggattagagttaattaattgttggagcctctctgagggctgagatccttgttagatagaccaggtgaaatgcctcaagagcagagagccagtcaattttattccagacaatatccagctaactgctatacacaatagacatttgtgcaagtttctggatgatgatcatggtagtgaacctaaaagtcacccagagttagactctgaaccttatgctcaggagaaagtgcctgacttgaactgcaatgggatcccaataggagtcattaaaggcctggaaaagtggtgccattaggagaaaaagaaatgatttcttgagcttgctctcagttctcttttaggctgtcttgtactcagcagaatagtgagatcttcaaaggttggggtttgatagtgccttgaataatttttaactttatattgccagcggaagaagcattctctttttagatttaaaaaatgtagatacaaatattaggggttttatttttagtgaaacatttcaaacatacaggaatagataattatgtaatgaacactcgtatgtccaccatctggctttgtaaaatcttaaaattatgtcttatgtgctcaattgttttatttcataaaagatactgataaacatagctgaagtcacttgtataccattcaccttcttccctgtagattactatgaactcggtctttttattctcatacatattttttgtatttttgcagtatatttatgtgttcataaacaatatgtaattttacaatatgtaacacactagtaacatactaatttaaaacttgtttttagtttacaatatgttgtaaactattgtaagctaaagacatattgtacaacctattgtaaaataaaaacaggttttagttttaaattaggtatgttactgggatcattctgcaacttgtttattcctctccagctttgattttgtggttttattatcttaacctacacttttaattaatccattttatttgttacatggtattctattatatcataaaaacttatctattctgttggtttttgttgttggtcatttgagaccatgtcttcgctctgtcacccaggctggagtacagtggcgtgatcttggctcactgtgacctctgcctcccggattcaagtggttttggtgcctcagcctcctgagtagctgggattataggcgtgtgccaccatgcccagctaatttttgtatttttaatagagacgggatttcaccatgttggccaggctggtcttgaactgacctcaagtgatctgctcacctcagctgcacaaagtgctgggattacaggtgttagccaccataccctgcctctattctcttgttaagaggcatttagcatggttatacagtctcttgccctcataaacagtgctggaagaaacacatgtttcttgtgtatatgaatgaaaatttgttttatacattagatatttccaaattgttctcttaagtacttcagtttacatcattactctcctcctccctcccctcccacccccacccacaacagtattcctctttttccatatccttgctaatgtttctaaagttttgctttttacatttgggtcttagatccactagaatgtatttttgcattgggatgaagttgaaacctaatatattttccaaatgagtaaactgttgtcacagaactatttagttgtattacctcctctcttgtatatcagatatatctacatatatgtcagactgtttctgggctgtctgtcctctttaattagttcgtgtatctgtttctgcatcagtagcatactgtcttaactactgtagctttataaagtctattgagtaggacaagtttgtttcattcttcaaaattgctttggctattcttggccctctgctgtttcatattaactttcagataaacttgtcaaattctaatgaaaactgttgataaacttgttgattaacaaattctaataaaaactgttgagatttttattggaattgcaatacatttatagattaacggagaaagatattgacaatacaattgagtttccaattcacgaacatgttatacctctccattaattcatgtcttttgaatgtatccaccaatatggttttgtaattttcttcataaaggttttacatttaaaaaattcttatttttaagtgatcttatagtttttattgctaatgtgaatgagatttttttccattatgtttctgttggttattcctgaagtggtaatgcttataattttggggtgttggtcttgtatctggcagcagatacaagaggtgctcagagttgttcagggttgctgaactcttagttctaaaagtgtctgtcatttggggtttctatgtagataatttaattatctataaaaacagttcttcattttcagttcatatatttcatatttctttaagttttaatttttatttttaaacacaattatccataaaaccctaaccctttccctagtcaacagcagtcacagccaaatgttttattaattgctatactcagtgtttcttgtatctcataccttctggggtttcttgtcttgttgaaatacaccctttaatgtttctttagtgaagacccaacagtggcactcactcacctttgtttacctgaaaatttctttattttcatcttaattcatagtctgtcttttctccagtcaaggaagtgtcttatagggaagattctggtttcactatgctgtatccagggatatatatgtatttatagatagacttttaatctgaggactaatgtattttatcctacagtattaccaatcattatttcttccataacttctagaccattccttttgtacttcttttttagagtcctattagatgagtgttgacacttttcaatctagacatcttttttaaactatattttcatactctttgtctctttaggtctgattttttaagttcaggggaatatttcattttgggtgagttgtagcactcacttccaattcactaattctaattatatttaatctacaagttattccatctataatttatttcaattaccactttttgttttcaaaatttctaattttatatctgattttgtttcatttttgttttataatttcatgttctttctagattttacatctttttatgcatactaaacatactcacttgaaagtctttgtaagattgttctataaaatgttacctgaagtgaattcatgtgctaattactgttggcagtttttctgagccattttccttgtgtcttttgaaatttctgtttgtaagcccttttaactgggaggtgttttttgcttatgtactgttctcttttcttccccttcttctccttctctgttcattactttttgtcttggagggagtctcttagcccagctcagcccaagctaataaggcccctgacttcaagtccccccttcttgcatggagcaagaagtgatcctcctgtctcagcctcccaaagtgctgggtaggcgtgagccaccacatccagcctagagcacttacattgctacatatttggagcaaacataattaaagtatgacttactgtgacccagcagtcaataacagatacgtttttgtaatagaatgttgaagggtggtaactggtggttttacttcatggagggctttaggtcggctatatgggaagctgccatcatgatgcttttgttctacacatttctgctcagcctccagagatgtctcctattctaagagtcgtctttgtttactcttgtgtctatattttacttacttaattccctcacataatagtgtatcattgtatcccatctgtgctctatcaagaaatgtagcacaagcatgatgtgaactatgaattttcgacaatttaaaaaattaaaggaatcattcaggggtaaaaagcacaaagttgtagaacagctgaagtgtgttctttttatgtatcctgtctttgccccctttctggaaacttggattggcctacttgcagtcactgtcacagttacactacttctagcctcaaaggtcattgaaaggattgggatttttgagaaccacaataacacttgctctaggtactgaaaaggttgtcctgaactcattcatatctttttatgttcatcccagtttgtttttgcttttccccccaggattttgattacacagacatcttgcaagcatatttccattctttctctcccactctgtgcctggtgcccgtaggatctgaaatagcattggaatgacagctagccttctggaacctgcagtttcaaccaaagaaactctgattccagataacccaggagtttcttatcctgcataatctaggagtttacaaaaaggctgcttatgggtactcactgctaagtacaatccactgccaagtttggaagcattacctgctctcacaacccagggaaagtagcccttagtaaaattcaggttttttcaaaccagccttaaccttacaaacagaatttatcatcatgatttttctttcaaatgcagtacagcaaactttaggatcaatgttgacatcgtattgcgtttagtcctgttaaaatactctcagtgccaaatacacacttctgccttttttctctttagagtctagaattctgtggggttccaaaaatgtatgtgcttacaaccttttatatgtaaccacctagggattaaagggctaaatgtgaaggaaagtatctttacaatattcatcttgggaagctctcattttggtgagttctattagagaaaataagacacaagctcattaaaaatatatatatattctgagcctggcatcttggtataaaattcaaaacgttttaaatctatttattagtaagactaacatagacctaagtgtgaagactaaaatattaaagcttgtaggtgatatcatggttgaatatgaccttagagtagattccttaggacagaaaaacaccaacaagagaaacaattgactaaatggacttcattaaaattaaaaatttatgttcaacaaaagacactgctaaaataaatacagaatttacagactaaaagaaaatatttgcaacatgtttatctgaaagggcttatatccagactatacaaagaattcctgtagctccataataaaaaaacagacatcccatccgcataataaaaagagcaaaagacttgaacatatactatacaaaagaagatacaggaatggtcaataaataagcaaatgaaagagtgctcgacatcactaattatcagtggagtgaagatttaaccacagggagatacgaattccagttctaggtatttttacctcaagtgaaataaaaacatttatccatgaaaaaacttgtacaagaatgttcatagcagtgctctattcataagagtgcaaaactggaaacatcccagaatagataacacattatggtatagtcatagaatatactatatttatcagcagttaagaagggaactacttatgtattcaacaacatggatgaatcttaaaaacatggttaagggccaggtgcggttggtgcatgcctgtaatccaagcactctgggaggccaaggcgggtggatcacttcaggtcaggagttcgagaccagcctggccaacatggcgaaacaccgtctctacaaaaaaatacaaaaattagccgagggtggcgcacacctgtaatctcagctattcaggaggctgagacatgggaatcgcttgaacctgaggggtagaggttgcactgagccgagattgcatcactgtactccagcctggtgacagagcgagacgctgtctcagagggaaaaaaaaaagttaaaaaggcagacagaggagtctatattgtatgattctatttatataatctagactaggcaaaatttatccatgatgatagtaatcagattgaaggatcagtggttgcttggtggaaattgactgagaagggaaatagtcatgtaagaatactggcaaatgtcctcttccccattacaaacgtctgagaaagttactagaaaacagaatccaatttgccttctcacccccaactttgtaatcttgaatccagatcctgattccacccaaccactctgctgaatggatagcagctatattagagagacaatatagtgggcctactagttttaaaaagtcatccaaagaatgtcatctacaatcagttaaattagatttttacccattactgaagtgtgattgaattagggaaagaggagaggtggtcaaaggcagccttctccagtggattccttgtcttcttgagatggttttgtgagaccttgcctggaagacctaggtggatagtttattttctaaaagtagtcaagaaagcttgttcagggcattgaacactgcagggacaagcatacttcttggaggccagccatctcctgctggatctaagcggggtggcttctgcctccacctccatctcagcttatttgagagaatcctagatccttggtgcagaagcccagccagcctgtgaagaaaagttggtctggtagtatcctgtgaatgacgtgcgggttgggtttttctaaatctcgtttacctgactcctaccttacattccagtggtgtgactaaggaactgagcaaacgtaaccctaggggactttgagacaggctttggtagtccatgtgcactagagtgaggggaaagaggccactccagagttgggtactctactgttgaaggtgagccttttgtgtccaatttttccgtgcatgtgtaagaacagttgtcatggagatttactactgacttgtgcatgaggacagcttatatctcaccttttcttattcaccctgttaaatgtcaaaatgtactaagacttaggtattttttctgtgtcaccaactactaaatcacccacccatgatagcaggtagttactgaaactcttgtagccaaacaagtgcataacactggtacacatgatgtgagagtgcagatgactccttagcttaactgtgtaagcttttaatttctgagtacttttaggattgagaagtggaagacattcttgctctaggtatctcatgcttctgcacacccagaaggctggttgcgcccccaccccaccccccgcccccttttttttttttttgatagggtcatgctctgttgcccaggctgaaaggctggttatcttcaccacaggtcttatgtctcaaggaccacgggtccacgtcatagtcaggaaccaggcatgtgtgggcagaaatcactaccactttcctttgttgcgggtggggaaattaagagcagagattcttggattcttaaattccttctctatgtttatgtcatctagtctgttttatgctgttttatgtaattccctgcttctggatttcttgaatttttttccccttctcacttgtcataattggctcttgcttgtgagtctattttcattcagcttggtagcagaagtcttcttcactattgtttagattcagttttcacatggttttagtaacccttcattgggtttagaatcaacttttaacccttccaccaaaagctcttatttttttaaaggcttcccagaaacatagtttctctcaatctcatcaagaaatgcttttaaatgcagaagttagaaaatggtgaataattatggctgttcctggaagtcattgtgtccttagtaattacatgttgtagtctttggttctgcttctttgacagctccaccacactgtaatttaatggaattcacttagatttaatggaattcagtcctggtagaaaactgctattgggtcacagagttggcagcaaggctgtgaaattgatgtgggaatgggggtgattatgtgctttgtgttgacagaagttagtttttgggacatcccatgtgggtttttcccaggaacataaacattttagagaattagagctagaaactttcttctgggaaagccttagaagtcagttgtgcttggcagtgagatgggacaatgtgcattcttaacaggttaaatgtgccaaactctctcttcagtactattcttttttacgtttgcttaaggtcaagttcctgctcttttgttcaaagtcttgctttgtcacccatggtggagtgcagtggcgtgatcttggctcactgcaacctctgcctcctgcgttcaagcaattcttgtgtcttagcctccctattagctagctgggattataggcttgcgccaccttgcctggctatattcaaagtctgtctttactacactgtcccaaagtaatctacatttgggtttgggtctttacagggtgagaaggactggcagaaatacgagactgctcggcggctgaaaaaatgtgtggacaagatccggaaccagtatcgagaagactggaagtccaaagagatgaaagtccggcagagagctgtagccctgtacttcatcgacaaggtgagagcatcttcccatcggcattgtctagtgttgagcttaacaaagggagtttctgctctgccccaggccctgtgccacatactgtatatcacaactcaacatacatatatttgtatgtaaaactgaatcaaaagttgcacaaaacaatgcttagccttactgtgagcagtagattctgatctttttttaactctatttcattcctttagaaagttggttataacttataaaattgtttaaataaaccatgcaggtatcaccattatatagttttaaagaccacgctctagaggagatcaatttcttggtactcacgagaagaaaaaaaagttcatgtttttcccccagtcttgtattttaacataagttctgaattgtctcaaaattcacactagctttttgagtttgattgcccagagtagcagcactccctcatttgctgccttatttaattttttttttccttttctccatccctatttcagaggacagaatagaaagaaaaggagcatgaatatttaacatccctatagatttcatagtgagtgggggaggaagtaacactgcagaatccagagttcccaggccatgctgactgatgctgtggcttcaaacagaattgggaggcttctgttttggatgcctagaaattgcataagggtcaaaaggctgggcgcagtggctcacgcctgtaatcccagcactttgggaggccaaggcaggtggaacacgaggtcaagagaccatcctggccaatgtggtgaaaccccatctctactaaaaatacaaaaaaaaaaaaaaaaataaaaattggcgtggtggcgggcgcctgtagtcccagctacttcggaggctgaggcaggagaatggcatgaacccgggagacggagcttgcagtgagccaaaattgcgccattgcactctagcctggcgacagagcgagactgtctcaaaaaaaaaaaaaaaaaaaacacagaacgaaattgtgtaaggatcatgtctcttccattcatgctcatcttttctttctttcctgggcagcttgctctgagagcaggcaatgaaaaggaggaaggagaaacagcggacactgtgggctgctgctcacttcgtgtggagcacatcaatctacacccagagttggatggtcaggaatatgtggtagagtttgacttcctcgggaaggactccatcagatactataacaaggtccctgttgagaaacgagtaagttaatgtacctgtactgtctgacttgttttccattattcaacaagcatgggttgactgcttttttgtgtgctttgcactttgctgggcaccagcaaaagtgacttgagacaggcaacatggcacatgcctgtagacccagctattcagaaggctgagacaggaggatcactggagaccaaaagtttgaggctgtagtgtgctgtgatcacacctgtgaatagccactgtactccagcctgggcaaaatagtgagaccttgcctctcatattaaaataaataaaaataaatgacttgaaagaggggagaggtattatttgatatcttgtgtacctccttttagtcactgttccgccctgtgctaccttcctggtaaggagtggccttctcctatagcagtattcaatggagcatgctgtagaataggcccttagagcaaactcagcatatgatttaactatatcttagtatcccctggtcatgtggtacatttgtcacttttcatctttgctcagcctttctccaactcctgactgagtgaaaggttaatgttagtccccagatctctgagcccatcactgaagagggtactatagctctgtagtcccaacctaatcttttccatagtattgggcttgaaccagagacttacagtgtgcaggatcctaataatccagcccaccagcagtcctcttcttataaagacacctcttctcataaggacaccataatcagtaatcaggttttgctggctgtggaagtactctggacagattagataacagtatgtatcaatgtaaatttttgaagctgatactgtgtaaatgtaagggaatatctatttttagaacatacacactgaaatgtttaggaccatattataagtaagtacttataaatgtactttaggaccatattataagtaagtacttataaatgtactttaggaccatattataagtaagtgcttataaatggctcagaacaaacaattatgtatatatatctgtaaatatacacatggagagagtgagcatacatgcacactgtgcaaatgatgaatggggtaaaatgttaacagtgaatctcggtgacggatgtatgcgtgttccttgtgcctttttctttgcaagtttctttaagtttggggttatttctaaagttaggatttttttcaagagtaataattaggattcacttatatcttttaggtttttaagaacctacaactatttatggagaacaagcagccc

SEQ ID NO: 185 - DNA, 3740 bp, Homo sapiens
caaatgcgaacttaggctgttacacaactgctggggtctgttctcgccgcccgcccggcagtcaggcagcgtcgccgccgtggtagcagcctcagccgtttctggagtctcgggcccacagtcaccgccgcttacctgcgcctcctcgagcctccggagtccccgtcccgcccgcacaaggccggtcgccgtctgcgtctcccccacgccgcctcgcctgccgccgcgctcgtccctccgggccgacatgagtggggaccacctccacaacgattcccagatcgaagcggatttccgattgaatgattctcataaacacaaagataaacacaaagatcgagaacaccggcacaaagaacacaagaaggagaaggaccgggaaaagtccaagcatagcaacagtgaacataaagattctgaaaagaaacacaaagagaaggagaagaccaaacacaaagatggaagctcagaaaagcataaagacaaacataaagacagagacaaggaaaaacgaaaagaggaaaaggttcgagcctctggggatgcaaaaataaagaaggagaaggaaaatggcttctctagtccaccacaaattaaagatgaacctgaagatgatggctattttgttcctcctaaagaggatataaagccattaaagagacctcgagatgaggatgatgctgattataaacctaagaaaattaaaacagaagataccaagaaggagaagaaaagaaaactagaagaagaagaggatggtaaattgaaaaaacccaagaataaagataaagataaaaaagttcctgagccagataacaagaaaaagaagccgaagaaagaagaggaacagaagtggaaatggtgggaagaagagcgctatcctgaaggcatcaagtggaaattcctagaacataaaggtccagtatttgccccaccatatgagcctcttccagagaatgtcaagttttattatgatggtaaagtcatgaagctgagccccaaagcagaggaagtagctacgttctttgcaaaaatgctcgaccatgaatatactaccaaggaaatatttaggaaaaatttctttaaagactggagaaaggaaatgactaatgaagagaagaatattatcaccaacctaagcaaatgtgattttacccagatgagccagtatttcaaagcccagacggaagctcggaaacagatgagcaaggaagagaaactgaaaatcaaagaggagaatgaaaaattactgaaagaatatggattctgtattatggataaccacaaagagaggattgctaacttcaagatagagcctcctggacttttccgtggccgcggcaaccaccccaagatgggcatgctgaagagacgaatcatgcccgaggatataatcatcaactgtagcaaagatgccaaggttccttctcctcctccaggacataagtggaaagaagtccggcatgataacaaggttacttggctggtttcctggacagagaacatccaaggttccattaaatacatcatgcttaaccctagttcacgaatcaagggtgagaaggactggcagaaatacgagactgctcggcggctgaaaaaatgtgtggacaagatccggaaccagtatcgagaagactggaagtccaaagagatgaaagtccggcagagagctgtagccctgtacttcatcgacaagcttgctctgagagcaggcaatgaaaaggaggaaggagaaacagcggacactgtgggctgctgctcacttcgtgtggagcacatcaatctacacccagagttggatggtcaggaatatgtggtagagtttgacttcctcgggaaggactccatcagatactataacaaggtccctgttgagaaacgagtttttaagaacctacaactatttatggagaacaagcagcccgaggatgatctttttgatagactcaatactggtattctgaataagcatcttcaggatctcatggagggcttgacagccaaggtattccgtacatacaatgcctccatcacgctacagcagcagctaaaagaactgacagccccggatgagaacatcccagcgaagatcctttcttataaccgtgccaatcgagctgttgcaattctttgtaaccatcagagggcaccaccaaaaacttttgagaagtctatgatgaacttgcaaactaagattgatgccaagaaggaacagctagcagatgcccggagagacctgaaaagtgctaaggctgatgccaaggtcatgaaggatgcaaagacgaagaaggtagtagagtcaaagaagaaggctgttcagagactggaggaacagttgatgaagctggaagttcaagccacagaccgagaggaaaataaacagattgccctgggaacctccaaactcaattatctggaccctaggatcacagtggcttggtgcaagaagtggggtgtcccaattgagaagatttacaacaaaacccagcgggagaagtttgcctgggccattgacatggctgatgaagactatgagttttagccagtctcaagaggcagagttctgtgaagaggaacagtgtggtttgggaaagatggataaactgagcctcacttgccctcgtgcctgggggagagaggcagcaagtcttaacaaaccaacatctttgcgaaaagataaacctggagatattataagggagagctgagccagttgtcctatggacaacttatttaaaaatatttcagatatcaaaattctagctgtatgatttgttttgaattttgtttttattttcaagagggcaagtggatgggaatttgtcagcgttctaccaggcaaattcactgtttcactgaaatgtttggattctcttagctactgtatgcaaagtccgattatattggtgcgtttttacagttagggttttgcaataacttctatattttaatagaaataaattcctaaactcccttccctctctcccatttcaggaatttaaaattaagtagaacaaaaaacccagcgcacctgttagagtcgtcactctctattgtcatggggatcaattttcattaaacttgaagcagtcgtggctttggcagtgttttggttcagacacctgttcacagaaaaagcatgatgggaaaatatttcctgacttgagtgttcctttttaaatgtgaattttatttctttttaattattttaaaatatttaaacctttttcttgatcttaaagatcgtgtagattggggttggggagggatgaagggcgagtgaatctaaggataatgaaataatcagtgactgaaaccattttcccatcatcctttgttctgagcattcgctgtaccctttaagatatccatctttttctttttaaccctaatctttcacttgaaagattttattgtataaaaagtttcacaggtcaataaacttagaggaaaatgagtatttggtccaaaaaaaggaaaaataatcaagattttagggcttttattttttcttttgtaattgtgtaaaaaatggaaaaaaacataaaaagcagaattttaatgtgaagacattttttgctataatcattagttttagaggcattgttagtttagtgtgtgtgcagagtccatttcccacatctttcctcaagtatcttctatttttatcatgaattcccttttaatcaactgtaggttatttaaaaataaattccatcaacttaatggaaacttaa

SEQ ID NO: 186 - DNA, 2298 bp, Homo sapiens
atgagtggggaccacctccacaacgattcccagatcgaagcggatttccgattgaatgattctcataaacacaaagataaacacaaagatcgagaacaccggcacaaagaacacaagaaggagaaggaccgggaaaagtccaagcatagcaacagtgaacataaagattctgaaaagaaacacaaagagaaggagaagaccaaacacaaagatggaagctcagaaaagcataaagacaaacataaagacagagacaaggaaaaacgaaaagaggaaaaggttcgagcctctggggatgcaaaaataaagaaggagaaggaaaatggcttctctagtccaccacaaattaaagatgaacctgaagatgatggctattttgttcctcctaaagaggatataaagccattaaagagacctcgagatgaggatgatgctgattataaacctaagaaaattaaaacagaagataccaagaaggagaagaaaagaaaactagaagaagaagaggatggtaaattgaaaaaacccaagaataaagataaagataaaaaagttcctgagccagataacaagaaaaagaagccgaagaaagaagaggaacagaagtggaaatggtgggaagaagagcgctatcctgaaggcatcaagtggaaattcctagaacataaaggtccagtatttgccccaccatatgagcctcttccagagaatgtcaagttttattatgatggtaaagtcatgaagctgagccccaaagcagaggaagtagctacgttctttgcaaaaatgctcgaccatgaatatactaccaaggaaatatttaggaaaaatttctttaaagactggagaaaggaaatgactaatgaagagaagaatattatcaccaacctaagcaaatgtgattttacccagatgagccagtatttcaaagcccagacggaagctcggaaacagatgagcaaggaagagaaactgaaaatcaaagaggagaatgaaaaattactgaaagaatatggattctgtattatggataaccacaaagagaggattgctaacttcaagatagagcctcctggacttttccgtggccgcggcaaccaccccaagatgggcatgctgaagagacgaatcatgcccgaggatataatcatcaactgtagcaaagatgccaaggttccttctcctcctccaggacataagtggaaagaagtccggcatgataacaaggttacttggctggtttcctggacagagaacatccaaggttccattaaatacatcatgcttaaccctagttcacgaatcaagggtgagaaggactggcagaaatacgagactgctcggcggctgaaaaaatgtgtggacaagatccggaaccagtatcgagaagactggaagtccaaagagatgaaagtccggcagagagctgtagccctgtacttcatcgacaagcttgctctgagagcaggcaatgaaaaggaggaaggagaaacagcggacactgtgggctgctgctcacttcgtgtggagcacatcaatctacacccagagttggatggtcaggaatatgtggtagagtttgacttcctcgggaaggactccatcagatactataacaaggtccctgttgagaaacgagtttttaagaacctacaactatttatggagaacaagcagcccgaggatgatctttttgatagactcaatactggtattctgaataagcatcttcaggatctcatggagggcttgacagccaaggtattccgtacatacaatgcctccatcacgctacagcagcagctaaaagaactgacagccccggatgagaacatcccagcgaagatcctttcttataaccgtgccaatcgagctgttgcaattctttgtaaccatcagagggcaccaccaaaaacttttgagaagtctatgatgaacttgcaaactaagattgatgccaagaaggaacagctagcagatgcccggagagacctgaaaagtgctaaggctgatgccaaggtcatgaaggatgcaaagacgaagaaggtagtagagtcaaagaagaaggctgttcagagactggaggaacagttgatgaagctggaagttcaagccacagaccgagaggaaaataaacagattgccctgggaacctccaaactcaattatctggaccctaggatcacagtggcttggtgcaagaagtggggtgtcccaattgagaagatttacaacaaaacccagcgggagaagtttgcctgggccattgacatggctgatgaagactatgagttttag

SEQ ID NO: 187 - DNA, 60327 bp, Mus musculus
  misc_feature (1949)..(1968): "n" at positions 1949 to 1968 can be any base
  misc_feature (8743)..(8762): "n" at positions 8743 to 8762 can be any base
  misc_feature (14521)..(14618): "n" at positions 14521 to 14618 can be any base
  misc_feature (18936)..(18955): "n" at positions 18936 to 18955 can be any base
  misc_feature (25819)..(26117): "n" at positions 25819 to 26117 can be any base
  misc_feature (38774)..(39110): "n" at positions 38774 to 39110 can be any base
  misc_feature (48067)..(48086): "n" at positions 48067 to 48086 can be any base
gagagagatcagttctttgtctcaagcagacctttggcttactggattaggcttgtccacacacttgagagtggtggtctcttcattcaaagtctgtcaattcaaatgttaatctcatccccaaacatccacacacagaagcaagctgagtcacatctgctcacacatctgcccctggcgggcctgttaacaccgtctggggggaagatggcactggcttcaactgaaggaagagaaatctgcatccttgtaagcaggctgcagtgtttgattttggacttctaggttggggatagagtgtctctgatgagcatgtctctaaacatctgtcagcattgataccctcaatttccctagaggtttctggccgtttttgtctcagaagccctaaggtctgggtggataagtgatgactgtcatttgaatcaggacacttgccctaaaaacccaccttcctgagtgtctgttgagtaccatcgcactgagtgtcagatacaagaatgcgtaaccaccaaggactcaatagaccggtccatccttctccaggccccgtgatagtcagtttgactcaagacagatctgagttggataacatatcttccacttgtatcgactccttgccttctgcattctcacatatatcctttctaagccaggtattaagaaattaaaaactcaaaaaacaagtccagtgctagtcagctttcctttgttcctgtgacttgatgcctgagagaaacaggctaaaagagaaaggcttgtttggcaggtggtttgactctaccttgttcctgggcctgcggttacctcagaaggcgctcacctctttgtggccaggaaacaaaaaagagaagacaaaaggaactgtcacaaaacacttcttttaatggcccactcctagtaacctacacactccaactagactccacaccaacaagtttctcccaccttcaggcaataccttaaacttctaaggaataagagagttaatctggataagaggtcaggacccctacaatccaatcacctcctcaaagctcttggccctccaagatcagaaaacaaaagaaaagtagacaatttttatagagtcaatttaaggaaccctgtaggctgagagctaaggacaacatccacaaaatcacacagaggatgaactacacagcacaggatgctcgcgggcagttggtcttatctcggggtcacttgctggttctgctgttttctggctgaatgcgcttgggtagaacactttgtctttgccgatcccacatcagtcttcagaagagagctacttgatctctgatgctaaggtggagatttaaatgtctttgtttgtaaaacaatcacatgctgctctcagcccagagaaaggaggaagtcccatcaaacttcttctccacaccctagatctttagaatcaggtagtgtcttagtcagggtttctattcctgcacaaacatcatgaccaagaagcaagttggggaggaaagggtttattcggcttacacttccatactgctgttcatcaccaaggaagtcaggactggaactcaagcaggtcagaaagcaggagccgatgcagaggccatggagggatgttctttactggcttgcctcctctggcttgctcagcctgctctcttatagaacccaagactaccagcccagagatggtcccacccataaggggcctttcccccttgatcactaattgagaaaatgccttagagttggatctcatggaggcatttcctcaactgaagctcctttctctgtgataaccccagctgtgtcaagttgacacagaactagccagtacaggtaggttgataacttgcttgtaaagacaacagagcacattgaggcatactgggacatcctaagagtctgctatatctgcatcccaagcaagagttgctaagattacatttgcaaatttggagaannnnnnnnnnnnnnnnnnnnccacccccacccctagtacacatcaagtcccttcagacaagatgcatcctcccccactgaggtcagacaaagcagtccatttaggagcacaggatccataggcaggctggctggtaggcaggcaacagactaagagacaacctctactgtttttggggaaccagcatgaagaccaagaccatctgctacatatgtgcagagggcctaggtcaagtcagtggtcacactctgattggtgatcagtctctgggagctcgtaagggtccatgttagttgactctgttggtcttcctgtagagtccctgtccttttcaggtctctcggttcttcccccaacttcccccaagctccatctattgtttggctgtgggtctctacatctctttcatctctttttggctgctaggtagatcctctcagaggacagttatgccaggttcctatctgcaagcataactgagtatcattagtagtgtcagggactggttcttacccatggcctggatctcaatttgagacagtcattggttgggtattccttcagtctctgctctatctttgtcactgcatatcttgtagacaggacacattttgggtcaaaggttttgtgggtgggttgctgtccttctccctccactgagagtcttgtctagctacaggaagtggccactttaggatccatgttccccactgctaggagtttcagttagagtcagccccatagaccttctggagcctctccccatcccaggtctctggtatgtcctagagattgtgtccccctccccccacccttccttctccctctcctttgctccacttcctgttcgctcatttgtgtatttatggttaactatgtgagctctccactttctgttcctgctaagcctgtggcttgcttccatgcctctctgttcaccacggtggacttttatccctttggaactataaacccaaatgaactccactcttctgtaagttccctccgtcatgctgttggatcatagcagaaccaagagggctacatttctttctttactgtgtgtgtacacatgttcacatatgggtatactcattcctgagggatgtgtggaggtcaggagtgaacacttgggttattattatttttaaaatatgtgtatgggtggtgtgtgtgtgtgtctgtgtgtgtgtgtgtatgtatgtatgtatgtatggcatgcctggaaacaatgaagcccagaggagggcagtggattcccctgggactgaagttaggatggttgtaagccacactgtgggtcctgggaatcaaatccaggttctctggaagagcagccagagttcttcctctttggtctctgggatgccatcttaaatcctttctctaccttactttttggggtagggtctctcactatctctccagctcactgcttcagttagacacactaggaagtaagcctctggattggccagtgttcctccttcagcttacacagtaagtgctttcacccactgagccatttcctcagctctcaattacgattcttaatttttttttttaaaaagaatatgtgtgtctttgtgggagtatgcgcatgtgagtaaaggtggtcttggaggtcagaagaaggtacctcagcatctggaactgccactaaatttggtcatgagctaatgaaagtaaataaaacttgagacatgtgattcatgtaatttatgtcaaatagcccaaagagttgtttgtgagctttaaaacctggggctgaaaacatagcagaacaggccaggacatgcccgggcaggcccgttgttacatgtcctgactggcctagtgcctccctatctcctgcccttctgacagtctgttgatgtttaaatggaccaatcatgtgaaaccgagccaattcctcccccagccccaccccttttctataaaatcccctagcttccaaggctcgtggtcgaaaccactgtctcctgcgtgagatacgtttcgagccagagctccgccattatggctccaccatgtggtcgacacctctgtctcctgcgggagatatgtgtcagcccggagctccgtcattaaactacctcatgcttttacatcaagatggtcgtctgttcgtgattcttgggtgcatgccgaacggaaattgagtgggggtttccccactaggttctttcactaccacgtgtaggtgctagggacagaactcaggccctctgcaagaacagcaagcatactgtagcaactgagccattgcttcagttccctcatctatgttttatgtaaaccttatacatataaccttaaagatttatttatatatgagtacattcttcctgtcttcagacacaccagaagagggaatcagattccattacagatggttgtgagccaacatgtagttgctgggaattgaactcaggacctctggaagagcagtcagtgagtgcttttaaccgccaagccatctctatttttttaatactttttattagatattttcctcatttacatttccaatgctatctcaaaagtcccccataccctccttcccactcctctacccacccactcccactttttggccctggcgttcccctgtactggggcatataaagtttgcaagtccaatgggcctctctttccagtgatggccgactgggccatcttttgatacatgtgcagctagagtcaagggctccggggtactggttagttcatgatgttgttctacctatagggttgcagattcctttagctccttgggtactttctctagctcctccattgggggccctgtgatccatccaatagctgactgtgagcatccacttctgtgtttgctaggccctggcctagtctcacaagagagagctctatctgggtcctttcagcaaaatcttgctagtatatgacatggtgtcagcgtttggaagctgattatgggatggaaccctggatatggcaggctctagatggtccatcctttcgtcacagctccaaactttgcctctgtaactccttctatgggtgttttgttcccaattctaaggaggggcaaagtggtctttgttcttcttgagtttcatgcgtttagcaaattgtatcttatatcttgggtatcctaagtttctgggctaatatccacttatcagtgagtacatatcacgtgagttcttttgtgattgggttacctcactcaggatgataccctccaggtccatccatttgcctaggaatttcataaactcattgtttttaatagctgagtagtactccattgtgtaaatgtaccacattttctgtatccattcctctgttgaggggcatctgggttctttccagcttctggctattataaataaggctactatgaacatagtggagcatgtgtccttcttaccggttagaacatcttctggatatatgcccaggagccatctctatttttaacatacctgcatttagagatttccattggtaacatgatattggtgctcaaaatgcgttgaatttggaagcattttgcatttccagattgagaatgttcaacgcctgtttagacctgaagtcctgggatggttagcaatgtcacacagtgcttgtttcccttccagtaccctacctcagtaagatcacctgcagctccgagccagaccttggcagtgacttctaaggttgaaactcagtggttcggcttgttgggggggcaggaggaatgtggacagcgtttagtgtggcaacacatcgtactcattagaagccatcagttcactatgaactggctcatacgttaggcattatcaagaccgttgggcctaccagaatgctcttctgacaaagagcagcagatatttgtgacatcacaaggcagtggcagtccacggggcaggagcaaagacagcttcagagaaagggtcttgctgcctaagtgaagacaaggggactgggcctcacctgtccagccagtcacctctgtgcggccaatggaggtcaggcttgagttttgaagagatgtctgggccaagtcctgtatcaaacatggtttgggcttatgctatctttatctctgggcctctaattgatctcaaagatacacagacaatacagatggagctgtcaggctctctctcttatgacaaaagatggctttgtggtctcttgagtaaaacatgcccctggcccccatctgtagatctatatacctgtgagggagtaagggtgtggtcatatacagctggtctccactcccagtcacaaggccccacttccttctagttcatcttgtcagatagcctagagggcctctgaaatcctagtagagtggttatcttcaacatccaagtggcttcagatgaaagcagccgtggcaggttccagaatggtgtcatccagcaaaaatggagtaaataaatcatcttaggcgctctcctagtcacatgtgaactaaaagatgagtgaaattgattttaatgacatgctatgaaacctagtatatcaaaaaacataagcaacacagacataatatcctttatgtgtttcacaggttttcaaaatccaatgtgtgttctagacttgatgtgtcttggttccaaccaatcacatttcaggtgttcaaagtcacatgtaaatggccaccattctacactacaaatgtttgctccttacaggtagtagtgaagataaacactcctgcctctagggctacaacttactcctaatgacagagtgcaagatctgacgactaattcagtctcagcagttaaaaacagaacttcacttcccagagttcttgagtctgaggagacagattaaggcctctggtgagggcctagcctctgcttccaagatgcactgtcaccgtgtaactgggaagaaatgaacacgacatatacacagggcagagaggacacaataattcccttcccagttccatctgcaaaggccctgccctcatggcattaccacctcagacaagtgtctatcccttaatactatcacactgaggactgaagttcaacatgcgagtggaccttcgtggcctctttctccaggggctgctcctagcccaggtctaggctggcgagggttgtgaagtatttcccaggcgtactcctgggacttcatctcctacttcctcctttctattccccagtgccttccctatttgctgattgaatgccaccttacctggggatttaactttgccaaactccctttccctaaccgaatccgggaatctatcttggccttcagggctattgaagacctcaccattctgccaccaagcacctgacttaacctcttgaacatgccctgtatcagtctgttttctgtctctgatcttggccacaattagctttgtccttcagctctaacacacagcacaaggatctggtagaaactctatgctcctttcagtagcaacaaagtcacagaccagcataagtgcactacgtggcccaagggcagtaaagaggctttactctttctctgggacaaaaactaaacagcaaggtgttcctgggtatccgattgtgttcatggccctttgctgactgactgatcccatacatttaaacttaagggctaagttttagaaagtatttttacattatgactccaaattagtaattgaaatcacctcccttggcacaaaagcatcctggagtagtgagtggaaaaacctacctggaatctgacttctttgagtatagctactcaaactgctgcctaatttaaaaagcctccggatctttagcatatgttaatggctggtaattaccatgcatatgttaatgacatggaaattactcaatgcttcgggtttgattgatgagtaattttgtcagttttcccaatttttcagcctggatgacagacttttagttaacagaattactataacttattagtctgaaactataataatcatctcattaaatgagttacatttctttctcacattgccggcatcaggctttgtgaatcacaatttacaggttgtcagtacctttagacagaggctcctccagcctaaagcaaacacaaccttcccaaagccttcggtcaatagagaacctcgctctactataccccaaccacttccacaagcatcttttcatctttttcggagcaaggacgggagtttgctgtttacaaatgtacacagtgatgaacacagcaaatgtggctggacagacaagcatcagacctaatacctagaactcaaaccgtaaatgggaaccccagcatacatacatccagtaaatattcagggatatagataacctacaaaagtgctctgggaaattcttttctgggttccacggaaaatgcgcacagcctacctcctccactagcctgatcctgctaatcctcaaagatctaaggaccaaagggtgcgacctggacactcgtgtgcagacattcgggtgtgggtgctgtgtatttgggtgtgtagacagaatggggctaaagaaaatccttttccaaccccagtgtgcacttgtgtagaagtgctcaactcaagggagatcatgctgaatcgacagagctagtcagcgaaggtgatgatggttggacaccttatgatcctagatcaacagcaatggtgaatgtctggggcctaaagcaaacgcctcccatcattaaggacatctgaacctgccacggagctgataatgttttattccacttcaattacttcacattttggtcttcctctctgagggggtagggaggtataaaaagctctattgctttaggattctttaacgcaannnnnnnnnnnnnnnnnnnntttctggcaaggtcgctagcaggcttgctcagcttcccacttctcttcaccggtgacataccccgaccagtagtgacccctctgatggacaaagttcggggaatcgggagagctggcgtgggcccttccatgctcctcaagcgccgctcattctggctgttcaacccgagctctggctccttcccgccggcgcttgctgttccaggctggcgctccttggctcgccgagggccctgcgccactgagggccgggggcggcccagcaccggggggcggatggactgcgggctccaaaacatcgcacagggggaggtggccgcgggagaagcggggaccgcgttgggaggaggtcggtgcctgggctgcggggcttgtggggcgttcggagggcccggccacgcccagctctgcgggacggcgcccacgctgcccttcaacaccggcccccagtggctgctctcacagagccaggcgtcctcctccgagtagctctccggagtgccgccttcgggatcggagtcgggctcctgagaacaggttggggacggcggaggagtgacagggtcacggaagtaggggaacaagagcacggcgcgcagccgccgcgcgggagagcagtagggcagccggaggggcagcgacatctgcgggccgggccaagcggggctgcggggaggccggccctgtgcacgctcacgtcccgcgcggcgcagccacagccatggagggacccggcttcgagtcgtctccggcctggggaaagttggatggacactccacctggagtcaaaaggcggaatggagaccccgcgaggctgatgtcctcaacagggggcgggggagggtcagaagaaccagtttcagccggagcgaccagagcaagccattgacacttcagtcccaggaagggttaaccgcgtcctgctgcctaggtttacatgtaaatagagagccgctgctccaagcgggcccgggctagcacttttaagtttttgattggttgccaatgacatcaccacccgcgcgttctaacacaccaaacccactagcgggtccgagccggcctccctcccaaggcgaggcctcgcccctttctccgccctcctcggcttcttattggtcagagaccactgtgatgtagcgggcggcagcctctgggtcttcattggcgtatcgcgccgtcgctcggaggcaaccccgccccctccaaagcttacatttacgctgtagcaaaagagaaagtaactctgtgttgctgctggggatcaatgaagctgagtgaatgggggcgcactgcgcgagcgcatagctggagcgggcgccagatggtagagggctacgcttattgatgaagtaagtggaagacatcacgggtcactcagagccggagggtggagggttccgtgtgtgtgtgtgtgtgtatgtgtgtgtgtgtgtgtgtgtgtgtgtgtgtgtgtgtgtgagtgagagagagagagacagagagacagagagagagagagacagagacagtgtcagagagacagagacggacctacgtcaggtaaggaagatcctaaggtttagtcttttggctctgcttgccctgggatgaagaggggaaatgagttttggtttggttaagatgctttatggcagttttcaaagcccaaggctttgctcatgatgctcagtggtggcacggaatagggatgctacgtgccccaggagtggggaaggagcattctttaagcacttggtttttcttcagtccctgttagtggtggaaggaagattagcgagaaagggggtagggggttcgtgctatttttgtgggaggtttcccgggccagactggctttggagctatctgctgcaaggatgcagatctcagtgcgctctgtgcccgtgtgtgagcagcagcacagtgaagaggtaccggtcccagcctgtgtctctggaaagtcgttcccgggttctcctcctagggaataggctactaatcctggatgtccccttaccaggtagcaaaatagcaaagactttgactgcattcatgttccagctgggacacagttaacagtttttggaatagtactcgctctgaaaaaaaaaatactacgcaagggagagggaaggagggagggaggggaggggaggggagggagggagggaggcaggcagaaggtttgatcctttgctcccaaccaaaggtgggtgagagaaacccgagtcagtggggatatgcctacacgggtggggacgtgctcctgggtgcgcgtgtgtggattttgctggtgacactttggctcggtctcagagaacagttacggtcatgaatagaccgatgatccttgatgtttttccagtcagctcttaaagttcgtttagatgagtggctcttgcttggggtttgatttctctagtagaggagtcagaattgctatgttatagggtggccttgtgcctaccgggaggaggaaagtgatccattgcaggcacccttggaggaggcaaaggcagcccccgtgggctctaggtctgagcttcccaattagcctaactgtggtaaagggacgagtgaggttgccctcttggaatccacactgtttccaagaagaatatcagtatagggttgaaacattttttacaaagttgccactccagtggagatgcaaagtctgtctgtatgaccagatgaaacacatgctcttttttgcttaggggcacagcatagagaagtgtaaggatgagtggggtcacagaggaacgggccatgggtcagcctggggtggggttcctagatctgactccttggaaacttggtttctggatagttattcgtagtgtaagtgtgtgtgtgtgtgtgtgtgtgtgtgtgtgtgtgtgtggtaatggcttgatttgatttggaagagtctaatgtgagctctgaataggatgacgttgagcttttcaaaggacccaccagaatggaaaggaagattagctcctagccatggaggctgacttagggagacacattccttctgatatgcagaaggttaacatccagcccccatgtaaatatagctagctgccaagcatctccgtgcatctctgtgagctccaacagtgctcttgcttgtctctttgccttggctctggggaaagaaatgaaatacagtacatgccagggtggacagatgcatccatcacaggtgaaatagacttctctgcacaggagaggaggctcagaataaatctaagagcctccctgtctgccttcactgtttttcaggcctctgtgcctttacctccactaaggctgaacttggatgcatgtctctaacattatgtgacaggaggtctcttaccgtttctaatgtcaagtctaattttaacctttgacttagcatcagaatggatggggcccctcaggtatgcatcctctctgaacagatcaaagtgaattttagcctttgatagtatcacaacctagggcacctagaaggactttgactttgctcagagatatgcagaggtcttcccccggggattggatgagactggctttgttttcatgtgactttatttttttctttcttccccttctttccagactcttgacttcttgaattgccagttttcagcctcctcatgcctccatctcctttagacgacagggtagtagtggcactatctaggcctgtccgacctcaggatctcaacctttgtttagactcaagctaccttggctctgccagcccaggtagtggtagccacgctcctgtccttgccaccgccgttgtgaccctcaaggctgcgaatctgacgtatatgccctcatccagcggctctgcccgctccctgaattgcggatgcagcagcactagctgctgcactgtggcaacctacgacaaggatcatcaggcccagactcaagccattgctgcaggcactgccaccaccgccataggaacctcgaccacctgccctgctaaccagatggtcaacaacaatgaaaacacaggctctgtgttaagtccatcgggtggggtgggcagccctgtgtcagggactcccaagcagctagccagcatcaagatcatctaccccaatgacctggcaaagaagatgaccaaatgcagcaagagtcacctgcccagccagggtcccgtcatcatcgattgcaggcctttcatggagtacaacaagagtcacatccaaggagctgtccacattaactgtgccgataagatcagccggcgaaggctgcagcagggcaagatcactgtcttagacttgatttcctgtagggaaggcaaagactctttcaagaggatcttttccaaagaaattatagtttatgatgagaataccaatgagccgagccgtgtgacaccatcccagccacttcacatagtcctcgagtccctgaagagagaaggcaaagaacccctggtattgaaaggtaatgactctcccttccctccccacccccaccccccacattccttcctcaaataatgtcctgatcagctaggtttccctatgagattctcttacaagtggcagccttcttctaaccccaaggcaccatgaaccaaaataaaatagcctgtcttcttgtctctacttcgaactttttcttactctcttggtacattaagaaagtccaagtagcaatgaattgatataagatctgagtcccagctttgatctggctgccactttgggttgcctatgacattttacttgagatggtttgcaaaaggcactttgtacaaccaagatggtatctcaagccatgccttctctggtagctctgtttcagtcctcgagtgggttggaacttttttgatctctcaaggcctgacaaatgtcgatggatcagaggaagctgcgtctacaggtgccagtactttgtgggagaaactcttgctgtttctcacctgattgtcttgatgttcttattgcttctagtcatcttcaacaaaggcatgcatctttatcttaaagcctcattgaaagtgtgaattctccaaatgcatccattcctctgaggaagctgcaggggatagagatgtgaaccgcctacaaccatccttcctggtatcacctgacaagagttagcttctgtctcttccctagaaggagtcatacatcattttcccctagtgtagaataactgatgactggacaccccccccccccaaaaaaaggaatagatgacccagtcttctctgagcttctaacatacagtgttgtcctgaccatgggcacagtccacttgctcatctttgtccttttgggctttgagcattactcttctgataatatctacctagtcatgatggagagtgataactatcttcgtttcgaattttgagccattgtgtgcatggtgggtggggtggggtggggtggagtccagaaaaaataaaggacctgggtagtcatctgtccacctcactgaaatactgactcttttctaaacattgaaacaagaagatcctggaagcagcgaagattttcctattgctttagtactgatgtcagatcactgtatggaacaatgctacttaacaatcctcattaaaaaaaaaaaaaagaagaagaagtagatggcttattactataaattattttgtattataattatgttgagtttttaatcaatatcactctttacaggccagacatcatttatagtacttaaataaccaactatttaatttatcttcccttggccccatcccttgcccccaccccacgtgaacatcgtcattatctccatnnnnnnnnnnnnnnnnnnnnnnnnnnnnnnnnnnnnnnnnnnnnnnnnnnnnnnnnnnnnnnnnnnnnnnnnnnnnnnnnnnnnnnnnnnnnnnnnnnttagcctgttgcacttcccttggtcccatcttgtctttcttttcacagctgagaaaacaccatctacaaatccccacacctgtaaccaatagctttgtaggcatcttttctgcctcctgaagataggataggtttggtaaaaatcaaccccttttgtctgtgtcatctaagaagagtaagcagacaacgtagtttatgatggctctaaactcgaacacagggctgattacgatgcatagatcctatcctagctcttgctgtggagcttggtgggtagagggatggcccatcagttgctgagaaatgtctctcttgggcagtgctgaggaagaagaagggattcctgtactcttctcccataggtacatctgaggatccctgcagcctgggtttgctcatgggagtcagtgtaaagactgcctcagtggggcggggctgctgacctcaccaccaggcgccctgggcagctgcgctgagggctcatcatttcggattggttcgaccctggcggccggctgggaagacgctctggtggtagaggttgggttatttgtagttttcgggggggttgttccttcaactatcttggaatttggttgaaaatacatagttcaggagtaaaaggtctggtcgtctactttgttgtcattattaagtggtacctttgtgaggaatggcctaaaatcaggatcaagttagggaagagctaaaggagatgggacatggagtcccctgttagcctcttctctgctcagaccagaggttaatgtcagagcgcccttgaggtagagatgagaggtgcttttctctcaacaagtatggtgtgcagcttctcctaggttcttgagtggatcaagcacaccatcctgggctggcttctcttctgaggtttattttaggattcaccttgttggtgagctgagattgtatttcagctagtgggggagtggtaccattttggagtgagtgaattttgtagggagcctgtgtctgctggggtggggtgggggtagatggtttgactatatggttgtaagtccccaggccttcttggtttattttcagagatttttttttttttcccaaaagatgcctgatccgtctgaggttctggttcatgtttgtaaacaccggttgctaccctcccgttccaacttttatgtccctcagtttcaatgccacggtctccatttttggagctgcctgtcgggcccggtggcggctgggttgccattttagttaagcagtgtcaggttgggacgaaactgatcggaggcacagaagcccctgggattaagttactgttctaatttatagtccccgccccgctgtgacctaggtctgagacggtgtagtctctggcttgttcttacccactgaaggatatagagcaccaggcccttgtttctggtcaacctcctctgagtgagccacatgaatagctctttagagactcagtctttgaaaggattgtaacctttcccaaccagtgttgattgttgtgatcatctgtaacttgctctccaacctcaaggctcgacagtccttgaccttctaagacgagaggtgctgttctgttgtcacatctgtcctttttcacatcactggggtcagggaacttatttgtcctttatatatgtgggaagggcatgttttctacaactctttcttggtagccgtggcctttaaaccgttatgatcacaattttcaaagtgaacccctttattcccaaccagattaagtatatgcttcacctattggccttcccttccttgtttttgaaatattttatgtcttatgctatagtctactgtttagagttagtgttatatatttaattgagctgggagtattttacagagtggtgtagacatttttttgtttttttgcccccaagttaaacatgtagtgtcatatacctgcccaggagtgttctccaaatgtggaatgccactgttagtgactgggtcttgagtctcaggagaggcctccctccccttcctggagaccctgtttcagggcctgtctctgcctgtgcaattgttatgtcagagtccaggcctgtacttgctgcatgctctcacatgcaatggtagactgtctgctctgggtttccagagttctgctctataccagaggctttttgaaggggttgtgggggtaggggtaaggatgaaaaagacggtcagggaagtagctttgaaaggttgatgcagaggggagaagtcaggcaaaggagtgagatttacactaaaaacttccccctgatctccactgtgcattttcgtattagaaatactttctattaaaatatgcaaacatagttgaactattttcactgtaaagacggcatgaaagtaaaaatatgtaagttcatgttatatacccacccggagctcccaaaccttcctcttaattcccgaataaagagcaaatgtggtctaacagtttctcttaattaaaatagattctgaaatattcattagaaagcaataccgactctcacgacagcgaatggctacgccaggaaactagagaccctgggaaagtctcctttgtctgctttcttctgggggagtaatatatccgtctttgctttgtctgctcttgtaagacacatctacactgcaaacttattttattcttgtaactgtaattccaaatagatctgtaagaaaaagcagagaaatgtagggagaactgcagatcagcaggcctgaggacactgggtccctccattcagtgtccttgggcaggctgcctaagtttgcctaagcctttagttctctggcttcctcactggtcacaagaaggcgcagcactggtgttgcacttgggatgttcactcaggaattcaataagcggaggcttgcagagtgttcggcagagcaccctctccaccgagctcagcaatatttctgtgcattgaaatgtgtcagtcaaaaggtagtttgtcctctttgctcccaggggtacaacaacctcggtctagctgtgtgcctgcctctgtgtgtgtgtgtgtgttgctagggcctaaaaataacttgatgactgttacctaatttaagtagcatacagttgtgccaagtaattgcaaaaacatgttaggtcaaggggctgagtaatttgggcataccctagaattattcatttgtaggggagcttaggaaaatgggatgataaatctgtccagctaatgtcctggataggataacaaaagtctaaaacttttcaactttgtcttctctggcctcgcttcggatttatttttggaaggaggattgtagtctgactataaaagggtaggtggaaggaggaggggtgtgggctgctgcaaccctgagtgccagagaggagctggagtgtgagggaagaagaggagctgatgcttgctcatttgagtgggtcctgaatgctccccccgaaggactacaggcttgcctgccctccttccttcattgcaatccaagtgaaagacaaagggacttgagcccgcccctttcccatccctattcttacccctctgctcctcataggtagcttttccatgacactacagtgcatatagcccctatggctttgagatgcttcgctgcttaaacagaggggaagggcaaattggtctgaacccaggactctggatcattaccaggtcagatctatgagccaaactgggttgaaatgaactgggatcagccagctgggttgtcaaagatgagttcaggaaactcttgacagtgtggtgggtagtagtcacggattgcaaaccgagaaactgacaggaaagcagtcctcctcgttacatttctaaagcacatttctccaggaggcatgagtcgggagaagggtgactgggtgtttccccgcttagtctgtttgtgccaacccatcaggtggtctgatgagatcacgagggcagaagaggttcctgggcggaggcctctgtagcaggccgtgtttctctatatcttgttggctgtgatcagcagttatctccattctccaagattcctggagagcagtttgagtgtaaattagggccacacgacagtgcttaggcaactttatccactttggtaccaaataactaactacacacttaacgatattctgtttgttttgagatgggggtgactgtggagttcaggccagcctggaacttgtaacggtcatctttcctctgctgccaaattatggccaagtgctactacgtccagcttaaggatagaaattctgatcctcagagcggtcttctaatcaattctggaaggctgttgattctatgctgtcactagtggatgattgacactctctggnnnnnnnnnnnnnnnnnnnnccaaaagattttgattcatttggtctaaggtacaacctgcacacatgccaagattttgaaaagctccccaaatgattctcctgcacagtgaaattggaaaaccattgatctagttcgagctcgttatgcagttatggaaatgaggcctggagaggtttatgactaatccaaggtcacacgcgtgattaatttcagagccttggtcctttgtgctaaaataggtcttgttagggctatagactgatgtatgtgtggtacattattacctcagagcctcccatgtatagtgtaagacatgaaataaaataatacacgtagtcattttgaatactagtacctttttggttttcaggtttctattcagaacaacaacaataaaatagacttaagtcaaaggattttggaaagccgtccctgatggtcgagattttacctaggtcctggaatatgggccaactattagcatcgatttaatcccattttcttaggaacctaatattttaagggagagctaaaaagtaatgccaaggtacatccaaataaagggttggggaagggctatctacatggaaagtacttgctctgcaggtgcaagagcctgggcttgatccccagagccacgagctaaaaaaaaaagacagttcagcatctcagatgctaacagctcgttggcaggtagcatcatggagtacaaactggtgggtagagaggttagaccataggtcgcatcactgctaatagtcccgtctgtgtgtggtgtgtgaagcactgtgtgagtctggagactgtgttctgtcagtgtttggtgagcttgtgcttcttttcatccccccacccccacccccacccccacccccagcttgtttagagaatggcttatcttcaggagatgttattctgctaagtatctttgtgccatttttctctgctttctttttcaagaatgtttctagttttctcgacgttcactaagggcctacagaatttctttccagggctgcagtaggcaaaggaacgatgtatcattttgaatggaaagggaaatatcacatgttctttctgcttctgcagttgtggcagacagggcccccctgtgtagcagagtggaactttgtcatttgagcctcaactgtttggacatctttctgataggaacaagacctgtgtttaatttcacctcgtgtcccttgtgaggaaatgggcaaaatgggcacacgaagtaaacagaccactcaaacggtgcttcagagactaggtttgggcctgttttgttttatcttttaattttttaaaaaaaatttatattttaaggaccattctgaggtatgaggctaggatgaaaacagttctcattggttccaaagcctttgctctttcccctataggatgaaatttctctgtatgagtttctttgtgctgttgctgtgagaagatgctccagccagaagccaggaagggtttcttggtactcacagtttaaagggaagatgtggtggccagtgcgtgaggcagcgggttccatggtgtctgcagccaggaagcagagagagatgcttgctttctcgcttttctcctggggcccagccccacaggaacggcgatacccacattgcatcttttcaacttaaccgagtcaagtaatccttcactcgcatgcctggacacttttatttccttttgattttaggtcccttcataacccctctttggtaaatttccattggctacatttaccatataccatatgtgctatgtgatcttactaattgagaaaaattaaagaggtgaacaaacaatgaatggccatttattttcaaagcctcttgttgatggctgagcccctgccttaaaacaaacttttattgtaaagtaaatgaaggcacattttgcattcagcttgctagtgctttctaatcatgaagggtttttgtttttgttttctgtagatgttttcatccagaactcaagaacaaaatctccatgttatgtttgttttcggaatatatctatgtcagatatcattacttaacagttagcaaatctgtattcccctttcaccggcaagacccgtattttatgtagcttaaagaaaaggaagggtgatttgtccttgcataggaaatccgctgtgcctgcttgaaacttacacaggagagaaaggcagtgccctctcaagtctttgctacccttcccactgctgtgctgaaattcccagtggaaagcaggctaagggaagaaggttttattctggcttagggtttgatggggaaagcccatcatgttgagcaaggccatgaggacgcttactcttgtctgggctcaccagactttctccctctttaacttggagtggacctccagcctatgaggcaggacccttacaactttttgcagcattcttatagacacatcagaggtatgactcctactgagtttcaatccagtcaagttgacaagatgagagaccctaccataggtctgtctcttgtcagctgggcatccaaacacatccctagcaaaccatcagtccatgttctgccctggtaaagtaaaagtgcctttacaaagagaaagttggtgtagattcaatacattatctgacttctttaatgttttatttttgacaaaagccgcctcacagccccaccccagtcttgaatttcatggaaaaacaaaccgagtccagctgttctttgtgtttccagaaaggctttgcttcttgtcttacccagggagtagaatcccactgggtatctgctgcccactcctaatatcaagtatgtagaagaaacacacctgatccagggatggtgtcaggcccatgtgactttaccttgtgtctgaagtaagcactgtgaggggtaggacactgctgcccagatcaataccttctattttattcattccatggaaggaatcatttcacaccctttgaatcatggccctgagctccactaccaaccactgcactaaatagtaccagatgttgctactggaaagagagaagaagaaaaaaaaaatcagatgggaggaggggccaggaggtgtgggggcgaggggggtggcaggagggaggcagcaggaggagcgcagtcgtaacctggggatcaggtgacagctgcagactccaccctcaggcaagggttcagttccagactgctttcactggttccctcttgaaaccgagagcagacttcatggaggacagtgactgaagaaaaacggaccattttcttgggttttgtacttccatgcttataaagaaatcactttttttttaatgctaagattttgaaaagagtgagtcatacgattctctcaatgtgatattttaatgcaccattccagtcgttgacttcaggaaaaaaaaaaaaaaaaaaaagagcaggaaagcccaggggtgggatgtgtgcttgttgaaggagcacctggcccagtagcggaggacccagaagatgggcagacataaaaactgatcttttgatttcaagtctaagcacctttcaggctgatcacattgctatttaaagatgggccttgggtctccttgatgagtgcattgtcctggaggtgcatcccattaaatacaacttcccttcccccaagtccttggctgtcttcaagtgaaaattccattggtttttaagaagagtgtcctgctctgtccttaaagctgactttgcaagtgatcttaaccccgggttgtgtctcagactctggaaactttaacgtatgtataatgtgtcagaagttttgggttttctgactgttttgtttttagtttaattcaattagagaaacctttgaaaatggtgatgttatttctggtatttaggaagcatttccgtactgtcagtgtcttgtgtcatcagaataccggtggcttagaatcagagattcaggcctttggcctggtacacggtgaacccgggcatcttatgatggagcttgttgttagtatatatttaaatgtctggaaccttaatagtagagaggtagaggtgttatgtattaatctatcccactctccgtagtgggagctagatgcaggagaagaaaggcaggtgtaaatctaggaagagtgagtcagcagaagatgtgcttggtcccggtgactccatccatgagtgctcacatctctggcttttgcagtctagttagtggggattgggatgttaattacacatttcccatccttcctggctgtctcgtaggccttcgttttgctttgagaaatggaatcctctgagacaagcccacagacccaccatcggtctgttgcctggttgctgggttttgacctctcctttcctgttctgtctggcctgagatactgcgaggggttggagggggtaggtagttaagtgacctcaggagcctgttatagggagtagcatgctcttaggcaggatcaggtacccagtttcacctattggaaattcggaaactcaaaagcctaaggtatcgcctcaccccaaacatctcaggtccctctcctcccttctctccccttcactctccctcccccactccaagtcttcttttttccattctctgtctttttgacagggtttcatgtggcccaggctggccttgaattcagttactgaggatgtccttgtgtttcgacgacgtcctgtctaccgaggccccagtcatgcaccaccacaccacaccctcctgggctgtttggtgaatctgtgattctgccttgccttataacatactcgtccttcctattataaatagactttttctcttagaggaagtggacgttggtcactcggagacaagattccagggcggattgatgacttggaattttgatcttgtcatttcaacacttggacaagggaactttgctgtgcctcagttcccccagctgtgagaatggagataatgacgatgttcacgtggggtgggggcaagggatggggccaagggaagataaattaaatagttgcttatttaagtactataaatgatgtctggcctgtaaagagtgatattgattaaaaactcaacataattataatacaaaataattatagtaataagccatctacttcttcttcttttttttttttttaatgaggattgttaagtagcattgttccatacagtgatctgacatcagtactaaagcaataggaaaatcttcgctgcttccaggatcttcttgtttcaatgtttagaaaagagtcagtatttcagtgaggtggacagatgactacccaggtcctttattttttctggattggtgctatgttggaaaaaaaaatacatgcaattcctctcaaagaaaactgcagaaaattgagtgctagtaaaagctgttaatatacacttactgttagaacatgaagaacatttcacaatggaaaaaaaaaaaagatgtacgagccctgccctgcccaccctggtttcacttttacataacctctccatcccttacccatatatgtgcatgctttgcagagtctcatatagaaacttgagctgattttcactttgtgctgcagggtcggtcccttgcttcctgcatggttattacagattttcttcttcaatgctgtcatttgtctagtggccacattctgctcaaccgacgacctcctaatggacattacacttgcacccaggatcttaaacccgagcaaggtgtgggggggtccctgcttcagaaaccactcagtcttcctctgaccccctttagaagaatgaatgctggctgtcagcccgttgggagttatcttttctgttgtcctaattcactttcactttttagatcctgctgccaatcaaagtcctcagagttaagggaagtccctgtccttgacccactgcgccttggctctgacctgtgtgtgtgcgtgctatatatgtcattcgatacatgggctgtgatcctgggtttgttctttggttggggcacgatgaggcagtttggaaactccaagcagccagatattctatggaactagaagattagccagggctacaaacaatccactctctgaatcactcacagtattacattgttgataaaaatatattattacctttggggcgtgtgtgtgtgtgatgtgtatgtgatatatatataatatataacagcaccagtgtggaggtcagaattcaacctgtgagaccctgttctcactttccaccatgtggctctcaggatctcacgttgctgagcttggcagcaaataacctttgccttctgtgatatctcactggccttgataaaacacactaaaacatcagtaccaacagaaaaaagctagaccctgtaagatgctaagtatatacatttatttcccccatgtcccatttttaggtccactaaggtccccaaaatctttaagcaaactcagaaacacagggccatgatataatcagaatgggaagaactcccaccagtcctttcctgcaaaggtaaaacaccctttaaataggagttaattctctagcagataactagcttgtcttccttgataaagtacatattgggttgaaattattataattaattttgcatgtcatataaaagtccactatgcctgcgcttattccatggatctctttattcttagccaagggagagctagacgcccagtccactgtggtgagctttcgtggaactagggagatgcccagatgatgatgcctggcaggctccccacaagtaggggatgtgactgtgaagtaccaccatcaacgggcattgagctttcagattgatgagggtgtgtgtgtgtgtgtgtgtgtgtgtgtgtgtgtgtgtgtgtgataaagaccaaaagccaacattgcatgtctatctgtactctcctatagttttatacatgtaagtatgtnnnnnnnnnnnnnnnnnnnnnnnnnnnnnnnnnnnnnnnnnnnnnnnnnnnnnnnnnnnnnnnnnnnnnnnnnnnnnnnnnnnnnnnnnnnnnnnnnnnnnnnnnnnnnnnnnnnnnnnnnnnnnnnnnnnnnnnnnnnnnnnnnnnnnnnnnnnnnnnnnnnnnnnnnnnnnnnnnnnnnnnnnnnnnnnnnnnnnnnnnnnnnnnnnnnnnnnnnnnnnnnnnnnnnnnnnnnnnnnnnnnnnnnnnnnnnnnnnnnnnnnnnnnnnnnnnnnnnnnnnnnnnnnnnnnnnnnnnnncctcttctgcttgcatttgactactgggcggtctccccagcccaccttccacatcttctataaaacgtttggaaaacgttctgaggcctgagaaccagatgctccaaagttgtccaaatcatgaccttgacattcatctccgagggacctctgctttcctggttctcagtgaacagcttttccacactgtggagtgggattcctggctggctgggactgactggtggtggctggtggctctgacattaacccttgaggtccatggacatcattttgtgactcagcaggtcccagctccttccttccttcagcttttcttccttaccttcccagagctcttcagagctctcaaatctttcagatctggccacatggtgtcttccaggggtctttgcccatcaaaagccattatccgtggtggctttgttttgttaaggattgcagtgtgtgctgatgtgatgtacaaacttgggaacagaactcttgtcagataatggggtggagtgttcttttctggagaaaagtggctatttcatctatggggagacagctcactttctggtgcaatgcagcttgtagaaccatcattttctgttactggttgctaactctgtccatgtgaacacatgcttgcacatacaaacacatgctcctttctgttaacatggccagatagtaatgactttggcactcagcagggactccttgaatggggacatcacctttacctgagctgttgtctcctggtagctatgccctgcctgattctggtcgctagagctagttgaagcagctctgaatcatacttatcagatttcagaaacccttcttgggttgcagtgtgaaagactcagctgcatgttgaaaccataatttggtcaaatatgttattagtgttaattttggcctgtttccctttacatttcagggtagtgactagaaaaaatagtcttgccatgtagtatcctgctgacatttctatccagtgaggccaatctttgtataatgataagttatcatttctttctaagatgagaaaatagaggctgagagtggttcacagaatcacttggagtcacaccgaagtcgcctgaagtctaggctgactcccaggtccacaacatttatggctatggacttgtaaattgattttttttttctgccctctgtccctgagttgtgggagatgatctctcaccctctggaatctacagagagataagagtgcctgagctgctcctgcagagccccttggctcacacctgagtttatgttaatgagatgactcaggggacaagctggtcatctatcagaagggccagccctgtgactggcccggaagcttggaatgtagccagcctccgcagaagaggcaagctggactgaggattaagttcagacacggggctgatgatgaatcaagtccagttgcacctagtgaaacatgatcctgaagaacacagaagcctggccctcgaagctcaggcaggcatcctccttgcacacagggacatgccagcagggtaaatagagtgtcttcatttcacacgactgaacagagaagtgcacggtgtggaatactagggcctacgttgtgcagctttcattttgctggccctggcttgcatcctttatagtgaagccattaattagcacaaacaaaagtgctttcctgagttcagcgaatcatcctagtggattcttgaaccccgggtattatggggaagcaaagaactagtgacaatttagtcagaggtgtcagaggcctgagagacaccacacttacaactggcagtgaggccaacgctgttggggattgtggtggctttctgtaagagtcaatcttggagtcgctgtcagagctgtgtcagagctgcattgcagtattctgagatgaaagcacccagtgtctgcttgaaggccctggtggtgagagaacaccgtagcacttggtaagatagcaagacttgtttccctaaccccatttccttggagacaagaggcagccttcactctagtcttacaaaatgatgtggtcttgggaagactgctttagactgcaaggcttccaggtcagcaggaagacctgtgatatttctaggcccaagaccttcccacctttggaggccccctctatttcaactcctaggtgtcacctgagggggtgtggtggcccaacatgctggcctctttcttacaagaaattcttgaatattgatgttgagattttgttccagtaaggaaagcactgtgtgggaaaaccctaagtaagggatttgcattacttggtcatttgcattgttaggattcatacttgtggcgtgtctcactttgtttcaaaaatatggtgtcatatccaacagcgccttttctgtggacacccctgtttggatattttagccatggtcttgtatggttatttttggtctattttgttttgctttctccttcctggcttaaaatagacaaggtccccccacccccacccccacctccaaggccattagtttttagctttgctcagactagtccagtccagcaaagccttcttaggtcaccaagctcctagaaagtttgactcctcaaggcacgtgatagggccaccctggaaaatgggtttctaagaaaagaaaactgtcattacttggtgggaggggttctacaagaaacgggaatgaagcaaagagtatgaagagttgtgaaatctcctgaaatctgtttaacctggtctggccctgggctctctgcactctgtcaccaacgcaggcttgcttattagaagtttaatggtggcgatagtccagccaaataactgacagtagctttcactgagggtgtcaagcagctccctgccccctcagtaagggtgaggatggaatgtcagcctcagtttctaaaagagatagaacagatgcttagaactgactgccctagagttgggtgctcccttcccctgaggtacttccaaatgtttgcctgtggactacagggttcagagtacacctttcaagacataagtatgtgctacagccctgtgagagagcgaaggatgtaagaatccccttcaggagagaggaaactctcgccatttaagtcaaaactattaggggataatcccggtgtcttatttacttttatttttgtgtgtatgtgtgtgtctatatatgtccacttgtacatgcctgctcttggctgtgtgtgtgtgtgtgtgtgtgtgtgtgtgtgtgtgttcctgtgcttacctggtatatatccagcgagccccttggattctcctgtttctgcctcccaaggatggctggattcttctgtgggcattggatctgaactcacactctcatacttacccactgagtaagcattttacccattgagctgtctctccacttctttgataatgtgagtttaagtgacctgaaatgtaaataactagcctgccagttcagagttaataagacaaataagagggactcgagaatgcctgattgtagagctggtattgtgggagaaacagagccactgggtcagtgaagaccctgtccaaagtatctgtgattgttgatcctatttagatggaagggctgctgccaggtctaagggccaaaccagacctttcttaggcatatgcctgggacagagctctctatcccactgtgagcacttcttgaatgcatgctgacctgaattcaggcagggcctgtttccagacctctctccgcctgggtgtccctcttgaccatttttcctcacaactctttttcattcacttctgtcaacattgctcataagggaagtacagagatgggagcatgtgagaggagggacaggctagaggccgccaaatgtgacagatcttattctcaacctcacctatgggcctatttgtcacatgtaaggtccagcaactgttctttgcctcttcctcagcctggtaccagcagagttcatcttccctgcaccagcttccatgagctgtgacccgtggtgtcatccaggcgagtctcccagtgttctcagaacattctggcattgatacttcgctacagttttttctaatgtttcctcgtcctcatcccttctttttctctccaattagatttatctttggggactatttttaatctcccaaatccctaccataatgcggaacaacacataattaatggctctttctggctcattctgatgttcatctcatctaaaaatatttaacgagcacttgctattcagagcagacggtacagcctgaatgaatacaatttctctgaataactcatttagtagtggttcatttaattattgtatcaactctgctgcccattgatgctctactttacccagaagtaaactaggatctaaagatgccaaacaaccttccggagcctgtaccgcagaggcgcagggcagcctgccaccatttccctgagcagacatgccttgccacctaatagcacctttgctttcctgggctccacttttttttttttttaatattttttattaggtgttttcctcatttacatttcaatggctatccccaaaaatcccccataccctcccccccctcccttaaccacccactcccactttttgaccctggcgttcccctgtcctggggcatataaagtttgcaagtccaatgggcctctctttccagtgatggccgactaggccatcttttgatacatatgcagctagagtcaagagctctggggtactgggtagttcataatgttgttccacctatagggttgcagatccctttagctccttgggtactttctctagctccattgggggccctgtgatccatccaatagctgactgtgagcatccacttctgtgtttgctaggccccggcatagtctcacaagagtcagctatatctaggtcctttcagcaaaatcttgctagtgtatgcaatggtgtcagcgtttggaagctgattatggaatggatccctggatatggtccatccttttgtcacagctccatactttgtctctgtaactccttccatgggtgttttgttcccatttctaaggaggggcaaagtggtcttcgttcttcttgagtttcatgcgtttagcaaattgtatcttatatcttgggtatcctaagtttctgggctaatatccacttatcagtgagtacatattgtgtgagttcctttgtgattgggttacctcactcaggatgatgccctccaggtccatccatttggctaggaatttcataaattcattctttttaatagctgagtagtactccattgtgtaaatgtaccacatcttctgtatccattcctctgttgaggggcatctgggttctttccagcttctggctattataaataaggctgctatgaacatagtggagcatgtgtccttcttactggttggaacatcttctggatatatgcccagaagaggtattgcgggatcctctggtagtactatgtccaattttctgaggaaccgtcagactgatttccagagtggttgtacaagcttgcaatcccaccaacaatggaggagtgttcctctttttccacatcctctggactccattttttagcaataataaaaaactaaggatgacattgatgatttcggatagtggcagatgttctgatatgtggtcaaggagttagctgagagaatactcataatatcaggaagagcccttctgggagaccacagtcactgagccctgcgtgctgtctgctctgcaatggttaggataggatggaatgtggccctcaagtgtctatgttttggaaacgatgttttcccgacatggtgatactgcaaagtttgatacctcataggaggtcaacttgtcactgtccctggtagagcatgagactggttttgtggaaacctgacagcagagttgttatttaaaaaaaaaatgatgagaaaagaagtgggtagtccagcccagctgttaccctggttttctgtcccccctatttcccatcccagctgtgatgccacctgtcatgatgtgacacagccaaggtgaccttcaccaaagttagcaccatactgtaagagctttagtctctgaaactaggaagtaaacaaatctgtctttgtatcccgcctcaattactttgtaatgggaacggaaacagattcctgcaccctccccatatagaataatcctgtggaggtttcttctactccttgaatagttcctcagctgacagcagcagcatgtcctaacatttcacttggaaatcatgtaagattctcccaggccaaaggctcaaatgcagcagaactcccaactcctggtactggttgcaagtcccagggtgtcactgcacttctgaccaactagctggcaataaaagttctagaactcattctctagatttgattaatttgccatgacagctcacagaaattggagaaacatttagtgaatttgcttaatataaaggatattataaagcgtgcacatgaacaggcagacagcagagccatgtaagacgatgtgcaggtcttgtgtcatatgtaggcatgctatccctccagtcacttccacatggcccagccatctggaaactcaccaaaccttgttcttttgagtttctatggtgttttcattaagtctgaatgattgatgacatttttggccataggtgagcaattcactttcatcttctctagatcaagattgagggctagagccgaaattccctagcctctaaccctgctttctactttctggtatcacttccatctggaaggtgttaagggctcccagactgccactcaccttgttggcatacaaacagtcactcttatctctttggagattgccagggtcatctgggtgtgcgttgcttagtatcacagtatcacactgagggaatgacttgaaagagtggttaaacacagagagccttggaatagatcattgatgtctcacaccttaccaacggactgttcttgctgtgactcacctctgtctgctttgtgttgtagtagggctttgttgagcttaaggagtgctcgaggggtggggtcaggagggaagaatgaaagaattaaccaatgagcttgcatccaagaggttggcaataaatgtcataagcaagaagccgagtccctttagtgtggaaagaagagctactctgtgattccctgccctcaggaggtcttccccccgctgtaccatgttggatatggccttcagggaatgtgcctaggaagtccgacggtgccagaggtggagtgcaaacagggtcaggtttctgttcttccctcctgggctgcagggatggttactgggatggttctccagtaaccttgagcttatgtttataatctatgatcccactccagaccagcaggctgtattggttggaccataatgtggtctaccagatggggacacctcagcttttgacccgttactatatcctggcactacaacaaccacctccagaggtttccagaccctttctcctatctcttcgtgggaatggagaccatgcctggtttcagtttgaccttgcagagctcagccattgcgggtgatttgactttggcatgtggctgcagaggcagctcctgccttcccttccaggcagttgatggttaatatacttatcgttgctaactattcttgccaaatatagacttatagctctgacttacagaagtcagaagtagaagctgttgcgatatattttttgcggactgaaaacattggctaaagaaagcattccaaattgtgataggagcagtggcgcttctcccatctcgcttcctgaattccccaggccaaagccctttgacctgcagatcattacaaaatccatggctgtaaacgctgttgtttgagtgtggggtttccttcaaaacaagttgagtggcttacggatttgactggccagttctgttcatcaccattaggcatgggtcccaaccccagtctccattgtaaccctcgtcttttcctcccctctcctgaccatagatgacttttttgtttgtttgtttgtttttttgtttttttttttttgtttttgagacagggtttttctgtatagccctggctgtcctggaactcactttgtagaccagactggcctcgaactcagaaatccgactgcctctgccttccaagtgctgggattaaaggtgtcaccaccgcccggcccatagatgacttctgatgactttctctgaatataatttccagtgggaatgcttcatggtagaagaatgtagtcttttgaagcttgcccttgatgtttctagagatttattggattttacttaaatcccattgggaaacatattttcgctgtgaagttgtgatgtgtttaatttggggtataagataaatatggtcctggggtggagggatacatggatagtgaagtaagtttttcttttgtgccatgcgctggtttaatgagtagctttatctgtttgcttagctatgtttgattatttaggcttcttctgcctgaaaagtaaagaatatttgccctgccttcagagaattaaatgagcagcatagagtatgtggctcactcttgggaaaaatatgactttgtttaatagcactacactattaacattcttcctcttcagctttgcagtgccatctcagtgtgtccccccatcccttcccctcttgattaaccagagaatgtagggtttcccaaacacacaaaaggtctccaaggaaaacagttcttggctcagaaagatacctcagggtgagcttgagccaggtcttgtccataatgaggttgagggattcttctgagaaaggataacttttgtgagtgctgccggcgaagagaaggttctacatgcttgcttcttatggcttgcctggtgggttaggcagcctcccacccccactaccatctcaaccttggaccatatctggcttgactataaggtaatgatatccttaggttggctctcaggagccttgtcttaggtagcccacaagttctggcatgactcttgaatagcagatattctaatatacagacacttatatggagagagttaaactgagaaataaaatgtaaagtggctctatattagcttgcttgggttacgtattagtcagttttctgttgtgataacaaaagtcagtgctggatactttataaagaaaatattggttgctttcgtggttttagaagtcaggagtgtgagatccagtgcctctctctgttgggcctctggtgagggctttgccatggattacgtggataatatttcagctgtggaagtatgtgccaaagagatcagatgtcaagagtggaatccagagacactcagggcctagacctgctctcattggtactcacatgggtcatataagaaatgtgttcaccccttccaagcccagcacctgttgaccttacgatctcccactatgccccacctgttaaaggttctaacatctgtcaacatcaccaccctacaaggctcttagtatttgaacttttgattccttgctcaaagaacatccaaaccacagcacgttgctataacaaaacaccccaggctgggtaacttaagcaacaggaactagctctcccacagctaaagggcccaaactgtaagacttgtaagattggagtagccagaacgtaactgtccttttaccttctctcacccgctccttcacccaacctatttcttgttgtttgtgcggatggcaggcacgcacatgtcacaatataatgtccatgtcagaataggggaaaggggtgaagcaggaggcagaagccagctgcaggtgcatgggaaggagcccggggctgctcccccttggaatcacactgatttgtgcaaagcctaagccggttcctggcacgggactcaaagatcttacagtttgaatccggttcacataaaagtcataagcacgagaaagcaggcccagagcgctttaattgtcatcgttgtggaaagttacatgactgtcatcagctgttgcttctggcagtgctttctggactaatgtaaataaatgagctaacaggtttaaagaagcagcctgtatttacatacttgtgaagtagcctcaaacaatcagtctgtgctattcaaacacacacacaaacacacacacacacacacacacacgcacgcacacacacgcacacacacacacacacacacacacacacacacacacacacacacacacacacacacgaaatgtgtggcttcctcaatgcaggctcctcatgaaggcctgaagtctgaaggttatgatgagtagtgtgagtagtggaagccctgcttttccccttcatggggttttgacctgagtctgcctttttgatgagaacaggctctcctcagcaggctgaagtttaatcttcagccatttctatagcacttctttaaggcatggacttgggagagccccggactgcttcagaggaggggagagtgaagtggcaggggcagaaaggaatcccacaccctctgataaaacactccagagtcaccatgtcttggaagtcttccaaaggaagctagattttcattttttttaaaaaaatcataaggtccttttgactcagtttgacattttgtagataaatatttaggcaagcatattttgggtgtgtgtgtatatgtagctctgtatgtgtgtgtgtgtgaaggtcaaaggttgacattttgaacattttgtgtctgattcaattactccacattactgagacagggtctcttgctgaacctgacgctcaccaacttagctctctgtttgctagccagggaactctggggaccctcctgtctctgtctgcccagtgctgggacttggggcatccagccatgtttcttacatgggtcctagggaatccaaactcaggccctcatgcttgcagagtaaggactgtgtagtgaccaagccatcactcaacaccccaggcatgattgtttaaaagcacattcctctggagggtactaatgatgctatcaaaggaaacagctgaagaatcatgaacaaaacataagcaactggccctctaactgctcgtggatgagtccattgcaccacagatttagaaagaagcctcttactaagggcacaaggaaatcaggagggagcagttactggtttggagtctctcagtgccttcatagtctgggatagcttctttccagaaggctaggttttgtttgtttttcaacacacagcatgattcaggcagaggagtggtaggcaccaggagggaagcagaaatacccatgcttagaagattgtgcagaggtgtctacttcctgtaagcatctatggcctgtcatattcttttgtccaacacaagaatccaaaaaaaagattcaatgagttccaaattcaagcaaattctggtataggtttaccagatttttctccctttacctctctaaatgttatgaaatccaactgagtcagattcatgaacacaaagaagagaaatgacctttagaccgaggtccaaagatagtttgtgatgggttttgtttttctttctgaaataggatttcatgtagcttaggctggcctagacctttctatataactgaggctggctttgaagtcttgatcctcctacctccaggctccccattgtgagggcaaatattaggtaaacatgcctggccatacatggcatttttgaagtggcctctacctaggatttgtcactaaagtagacagggagagagaggtttactttatgttttagtgttcacaaatggttttcataaactcaaaccatagttccctacttcttctgtggctcctgtggtaccatctcaccaggttccatgccccctgtgggagacccatgtgcaaggggacttaagagtccctctccccaagaacagatcttccaccaaagctattaacctggaaatataaacatgaagtgataaattcaaaactagaatattctagcattgttttagttcaaagttacacacaggcatgcatctggttgctaaaacttttacagagtagttctgagaaaaattggtagtcatcatcaactattgaggcatatactacataataaatactttgtatatgtaaatagtgtatttttgtttaccctttctatagattaccatttccttaatgaactgaatttatcacagaagtttttaattgttggtgtgtgtgtgtctgtgtctgtgaagttccgtttcctaatttcctgtgtttgtttgtgacagagtcttatgtggctcaggcagaacttgaactcactctgtagcaaagaatagcttcgaacttctgatcttcctgcttccacctttcaagtattgggattgtaagtatatgccactatacccagtttatgtgctgtcgggtattgaacccagggcagtgtgagttctaggtaagccctctagcacctgagccatctccctaccccatcataatcttatttctggaatttctaagactatatatcatatccttacatatcatttctacaaatacacacatacttctttcatatagtctgagcaagtttgtcaggattgcactttttttgttgcttgccaatctgagctgtcttcccctttccttggtttctcggaaacaaacagtcagacagaaagggctagctggtgagagagggagggagggagggannnnnnnnnnnnnnnnnnnnnnnnnnnnnnnnnnnnnnnnnnnnnnnnnnnnnnnnnnnnnnnnnnnnnnnnnnnnnnnnnnnnnnnnnnnnnnnnnnnnnnnnnnnnnnnnnnnnnnnnnnnnnnnnnnnnnnnnnnnnnnnnnnnnnnnnnnnnnnnnnnnnnnnnnnnnnnnnnnnnnnnnnnnnnnnnnnnnnnnnnnnnnnnnnnnnnnnnnnnnnnnnnnnnnnnnnnnnnnnnnnnnnnnnnnnnnnnnnnnnnnnnnnnnnnnnnnnnnnnnnnnnnnnnnnnnnnnnnnnnnnnnnnnnnnnnnnnnnnnnnnnnnnnnnnnnnnnnnttctttacctagtactcacaaaaccactgggactcagccccttgcccctcctttcctttgccttggcctttcctccatcccttatgtgctagaagacagcaccttcgtccctcttctctcttgccaatatagcttcccacagggctggatcctaagataatttaatccatgcctccttgtactaaacttgaagtcacttgtactgtcaaatggccactctcatctatggggtatgtggataagttcataggaaatgaaatgtagaagccccctttgatggctgtagcggctgttccatgtacttctcatattaaggtgctctgtccccatctccggacattttggccttagacacttgacatcagctaggtcttattctttcgccttatctttgtgcctacagaacctcaggatactgcttgatatagtatcatttccactgggggagctataaaataatatttattatatgccaataattctgtcgtttgtgagctatattatatagaactgtgtctgtgtggaagtctgtggatgaatatgtccaagttactgatatgggaactgagatgcgggtatactaaataacccactggaggtgatgcagatggtgagggctaggaccagaccgcgttttactacagacttgctccatccagtccctatattcactgctgccaatgccctgcctgcctagtaacccaggaggaaagcaaggctgtcactagtcgtcatcagcattcttgcagcaagcagtaagagtgcccttttagagtaggcaacacccccaccctcctgtagatactaattctatctgctgacagtgttctccttacacttctaaggccacttctgagcttagcatgaagcctgtgtctgcaaggttcctctgtaaaacaccggcgtttcctgcttatgggttaggcatgtgaatgttcgttctttagccccacggccagagaatcagatcccagaaggcactgcggcagctagcaaggactggggcggaagtgtggctacagacaggggtttctcctgagaaagtctggcacttccagaggttgccattgaactcatttggtctctgcagatggctattaaactgtgaaaattctagaatgttcacttgccaaagtttttgtatgtctaaggcttttcttttctggttactaataaagcgttcatcatgtaccccatatggtttcagcaaactttatgtttgttaacttattttgttcttagaatagtattgcataggcactattttctactcatcggtaaggggaaaccaaggaagagacgcatgagaagcctgcttaggatctcatggcaagggtttatcagggccggctcagcctccagcagcttctccattactgaatggagtgtaggtggggtcatggtgctgatgaggagtataatggggtgggatgtatgggatgccatgtgatgtatctgtaaaccttcatgtaggtgtcctctaccccagccctgtgcatagggtgtattatgaatgattatgtattatgtaagacagtaaacggagctttcctaagggagagggattcaacaagttcctcggaggctgagatctcactggaggctgggcccatgtgtctccacccatcattcctcttcctctactccaaccacgccaacaatgtgttaatgatgcttttattggggtgtgtgtgtgtgtgtgtgtgtgtgtgtgtgttttgtttatttggctactctggctggccagtgcggtaccaggaatctccccatctcttcctccccagtgcacatatcacagacatatactattgtcccttgctttctcagggacactggggattcaaaccctgatcctcatgcttgtgaagtgggccctttactgactaagccatcttcccagttcccacccccgtgtagtattcttctgttatcaggccaaacaaaattaccccctcccctcattaggtaatcatttgatatggtctgcagggccaaaaatgacctcatgagctctactcttaccttctgctgctcccaatcccatactcacccctaagaggtacaaacaacccctacgcagatccctctgaaatatccctgtcagatactgctatttcacgcagcctccgactccacccaggagagtctccgtttcatcgtgacactgtacagcactcttgtgtgaggacggacgcctgacatgagcagacagagctggatgctgtctcttctgaccctcagtgagaacttccttgtccagctgagatttcagtcacatgcggcctttctctttccctccctacagatagtagtccacaagggtctttcccacatggctcagacatataataacacacatcatttcacatagataggcacacagcaccccatggtagaagcgttcggtgtgtcagtctcggactctctctgatccacccttcccccatgttttttccccccactaggcaaatggaaggccccttgccacctgttagcattacgtcattggctccccagaacacagttgtacccaaggccttaaacaaagtagttcttcttgtattgtttgcattcaaagagctgatatcatgccagctgatgtcattgtgtgtctttgtgtgagtgctatggcaactgggcaggtggggagcctccggctgatgtcattggggaaggaggggcagagactgaattttaaaaagctctctgctgagttgttttgtgtctgggggtgggagggtgttttggtatgcctttattttttattttttcaaactagctgctttaagacaaattacagctcgaacacactaaataagaacagagacgcctcttcccccttccagcctcttttgagtttagcttcccagtccttcctcccatcttacatggaaaaaaaaaggttgcaagtgcctttttccttcagaaagaagggaattcggttcccctggcaggatcagcatggggctgtttactgggggctttgtggagcccaggagattgccacacagctcctccctgtgtcctctgtggagtttgccacagtggcagtgggtagttttgcactctagttgttaagtgttcactggtgacgtggttttcctcgtgtcttgcatttttctttgtagttggaaggcttcctttgggctagccacccggctataatgatttcaccacagaagacaacagcaagggcagagtgtaattacagaaatgaattcaaatgaagtcaaagctctgacatgctctcctaaagacatgtttgtcccttcccgtatctcctttttgactggtagactagacacaggatggccctccctaccaagtggactgtgaattgttgctattcccttctgaaaatatgatctgtgctctgttatacagctggctgtgtgcatcggttcggggacacactgtgttcaggtcacctgctctagtggtcaaaaatgagactcgtggtttgaaaggatgtggtttcagttcagaagctggtggacaagtgaacttcctgtcctggtagcagagcctcactcactctgttcaggctttgtgcttttagccttaggctttgggacactcaagacctctgttactgggaagacatcgcttctaggaacttcccagggtctcacccttttctagaagaccccacgtgtcccacactcctttggtgaccccttcccaggtttcctaatgtctctctcatatacgtagtagaatttgagctccacaatccttcaggtttgtttgtgtataaatatgtgtagcataagtaacaaactctgacccgtgcattcccttaaccgttcttttttgtatggctaggcattttttttccagaaagttttaaattagctctttttcctttagcattaaatagaatcattttctttgattttatagttattcctttagtgggtacataacatcccatggatgtatttaatagttttatttttggtatttactcagccttttctttctttttaaaaaacttactgttgttgagtgtttgtttgaggtgattgtgtttgtgtatgtgtgtgagtgtggaagccagaggctagctttgtggagccagctctcagcttccaccattagacagatggagttgcgcgaacaccccacgtagctgactgcacagctgtgcttgtgcgagttccttgagtgactctgtacttatacaaggccatgtctgcatgctaaatgtgggaaaactggtgcggctttaacctcaaacctttaagagttccaaactcaagccttgaagttagagcggagccttgagctcggagtgtgccttgttagatccatcaaaggtcactgttaatgggttagtgtacccacaatcctctaaaagctaagtacaggaaaatgggccactctcagatgccactctcttggaagtcaagatctacaaatgtcaaggacatgtatggaagaagtgaaaatgtagatcctgagtcactcttccaaccctacgctacattagccaagccgccctctgcgttttctacctttgggcagtcgcagaaataagatgaatagaaatagcttgttcttgcatagtggccatgcaaggctgggggttgggaatatactaaacactttatctgtgtttatctccatctcggactcacactcagagagacatgcttgtgcaactcaggtcagtagtgcaagccgaacactagcctgtgtaacctggcttttccacaagccctgctagtaaccgctctgctactgagtcgacttgtccttctgtaaagtgagtcatagaggggacatgacatgtgtgcacagtgccaggagacaaacggaagtcctctgcagggcgatatcatccctgattttctcagctcccaaagtacgagttctatataggccagggaccatatgtctgttagaggcaaatcagattttcagttgatgaaattacggggtgctgtgtggaacttgttcccaggcaccttggcccagttttgcaataggggtcacagtgtcctctgaagctggctctgggtatccaaacaggcttctggctcttgtgttttattttagaaatgttaaagtacgcacatagccatagtgacacccatttccatgggaaagccgacattttttagcccttcccctctcctccccgactgtgggcttcactcatatgtgatttctgtgttttccttctagggggactcagtagttttaaacagaaccatggaaacctctgtgacaactccctccagctccaagagtgccgggaggtggggggtggtgcatctgcggcctcgagcatgctacctcagtctgtccccaccacccctgacatcgagaacgcagagctaacgcccatcctgcccttcctgttcctcggcaatgagcaggatgctcaggacctagacaccatgcagaggctcaacatcggctatgtcatcaacgtcaccacgcaccttcctctgtaccattatgagaaaggcctcttcaactacaagaggctgccagccacagacagcaacaaacagaacctgcggcagtactttgaagaggccttcgagttcatcggtaactatctctcacagcagggcgggcggagagcttcctcttggctctctcttccctctacttctggttttgatataaggtctgaagtgtattcctatgttagggaaaacaacaacaacaataacaacaacaacaacaaaacctacctaatgcatagtccttcctgttagtctcagaactacctggatgggcataattgagataataagctttctgttgccatcattgaaacacctgaaaggttgtcttaaacggaggaattatcttgacttatgatcttggaggtttcatgtcttggtgctttgattcttggcctgaggtgagacagaacatggaagggaaggagtcaaggtcagctggaaagttcctatactcagcttctcatcagagatgccaactgtcatcagtgaggcctgtagagtactggtctacctcatggccctcggcagcagtgtttcactcctcacttccacataccctgaccctccatggccatcatctggaaggcacggttcccaagtagctcagaatagagagcaccagaaagtgttgagtttcatattaaaagctttggatgcctgtgagcactggacaacagtttttgtgacatttctagattaaaacacatcccccaggaagtgtccccagaggaatgcaggtcaatgataaggtagaggagaagggagtaaagagacttgtcccttagctttaatcacccacactggctgcttcccagtagacaaagaaacaaacaggatgtaactatctctctcaccagtctgtagacaagcttgctttgagagacccaagagtaatgcttcaggaaagtctccctttgtgaacactaaatgacctcccacaccaaggccgtaggacatggtggataagaatgagtgaggtgcccactgccatgttctgtgtcaccccatgaaggctactgactttttggcaaataggaagggagggaccgggacagcatttagccttgagtggcacagtgtctgacctacttcctcaggcaagcctctaccttctaacattttagaaacctttggaaacagtaccaccagctggggatgaagcatttgacacatgagtccgtgggaccatttcacattcatattaaagcaataatcatcctctttgtccaacatctgtcaactggaagtccctatcctccatcctcccgttaacaaagacgccatggcggaggttggcacttagacactgtatgaccagaagattaaaagggagagtgcagaactgctcagagctattcctgctgcctagtctatgtcctccaagccctgaaggaagcaccaagtagagacgtgatgtcaccttaattattcctaaaccttcacatagcaaattggtcagctttattcacccagcataggggaagagatttccattgggcacagtgagttatagtgagtcacagtgtatggcttattcacttgaggttgaggcaaaggcagcatcgagaaagggctggctctgaagaaacttcttcagaagcaggccatgctgtggtaagtttctccgttcactttatccttgcagaggaagaatggaaggatggtgtgaattgtctgtcatcttccacccaagtgatctcagttcttaaacactgagtgacaaggactgatgttagtgcccatgagaagaaggtatatgtttcctttgccagtttgtctcctgctgagagaagcaggaaagatcaaccccccccccatagggcccatgaaggaaaattcttgccaagtaggctctaacctcagaaggaagcaatcaccagctcaatgctgaagttagcctttgtagcctttgtggcactgtggctagactcaggataactaagacaagaagagcaggtggcagatgttcaacatcatttccaacaaactccagcctttatcagcacaaagaggtagcccaatgctctacacattagcacctcaagttgtcacaggtctctgtctcaggaagaaagcatccatggttgttgctcgttttgccagaaaaaaaatgtcacaagtttagcagccaccagggtgatgggacttttttttggcaagttggcagctctgaactgcctgtgttcctttccagcttgtccttcatagctcggccatcccatggactctctggcaggacagccagagcggtctctgaactcagaagtaaagtaacctttccatgtcagaaattctagtgtcaggaaggaactggggactgggaggagacacaatggggaaactgtttgctgcttaagactgaagacctgagtttgaatcccatagaatccatggaaagtcagatgcaagagtacacatctgtaatgccttctcttccgtaacaagacaggaggcagagcacccctagacactcacaggacagctagcttggcaatctacagcagcacaggaaatcccatctcaaaggaggtagtaggcaaggccccacattgacctccacgtgtgtgtcacggcatgcctatacctgtgaaaacagaggacctagtgttcttgacttctggccatgactctttcccgtgtttaccatgcgtgccccactgattagttcctaacactgggtacaaagatgccctgggttctttattcataaaatctgagccaagccttgtgtcctgagcaagaaatgcccgtcaccagggcgatgaagttcctagttacttgaggctgttataaagaagagtcccacctgcttaatttcaggtggaggaagttgggaatttgttttccatttagcaagtggcatgggataggcttgttctaagagattacagccacagtgcttacattccttctggattattcaggcttacctcctcttttagaagaaaaacaaaactaatgacaagcaacatttatttagcctgcagaacaactcaggatcacgtgggtgggcatggttttgttctctgattggataaactgaaattttatagtgtggctttcagggggcacacaacaaggttcacagcataataacattcacctgagtttaatataaactaagcaatgttcaggtttagagtttaacaatgccagtttaaccccagaatcaaatgacttcatctccaaagatccagaggctggctagctagtgtcctttgcattatccgagcaggaagactgaagttctgggggggtcaaaggactcacaaggtcactcagctagtgtgttagtggcacagatggtcacactcagggtgcacctcactcattctcacccaccatgtcctacggccttggtgtgggaggtcatttagtgttcacaaagggagactttcctgaagcattactcttgggtctctcaaagcaagcttgtctacagactggtgagagagatagttacatcctgtttgnnnnnnnnnnnnnnnnnnnncagccagtgtgggtgattaaagctaaggaacaagtctctttactcccttctcctctaccttatcattgacctgcattcctctggggacacttccctgggggatgtgttttaatctagaaatgtcacaaaaactgttgtccagtgctcacaggcatccaaagcttttaatatgaaactcaacactttctggtgctctctattctgagctacttgggaaccgtgccttccagatgatggccatggagggtcagggtatgtggaagtgaggagtgaaacactgctgccgagggccatgaggtagaccagtactctacaggcctcactgatgacagttggcatctctgatgagaagctgagtataggaactttccagctgacctttaacccttcccttctatgaagttttagtaaaacgccatgcattaaatgctaactcttatagagaacaatctgtaggataaaggtgtgtgtgtgtgtgtgtgtgtgtgtgtgtgtgtgtctagcatgtggaagatattgctaatagcactgcatgtatcatgtagtcatatagcctggaaagtggtatgaacattgttaatcagaagacctttttcacatgcccatttctgtgcatggcataatctccattccttctctcctcctttccctactttttcttccctttatgccagtgttaagaaaatagaaaaggaacaaggttgtccagaaagaggtccgataactatggggtgcacagtagcttgcttctcctgagtgtgtcctgttgtaggtatagcttctgccttccccatctcctgtgacatgtgcttttcccacccatgacttccttgctctatctttctaaatgtagagctgtaggggactgggcagatggttcaacagtgaagcactcatgacacaagcgtgagaatcggggctaggatccccacaactcacgtaaaagccacatagctatagcagcttgcctggaatcccatggcacaagagactgagatggggtgccccagagcaagctggctatcctgaccagcagaaataatgagctccagatccagcaagagatgctctgtcgtgtaacatggagggtgatcaagtagacacatgatacggaacatggtcttccacagacacacgtgaacatgcatcagcacttatgcaaacatgcatccatacccacatgtacattatacacacacatatacatacacacacatacccttcccccctcaaaacagtaaagggccaatgagatggctcagtgaataaaataaggtacttgctgccaagactgacaccctgcatccagtttctactaattcatattgtggaaaaacagaactgacccttaccagttgtctgctgacctctctatgcacacagtggcatgtggaccaaccctgatttttctttttttaataatttaagaaaatgtagaccaacagctccaatttctgattgtggcccaactctatagctcgagatttgaacatgtagaatccatcatgctttggaaccattgaaatccattctctctatgcaaaaggaaccactgttgactcaggcagaagttaagcttcctctgtccccctttcttaccacctgtctctctgtcccacagaggaagctcaccagtgtgggaagggccttctcatccactgccaggccggcgtgtcccgatccgccaccatcgtcatcgcctacttgatgaagcacacacggatgaccatgactgacgcttacaaattcgtcaaaggcaaacgaccaattatttccccgaacctcaacttcatggggcagttgctggaatttgaggaagacctaaacaacggcgtgacgccaagaatccttacaccaaagctcatgggcatggagacagttgtgtgacaacgggcaggacggaaagggctgtgctctctcaggagacgaaaaggagggaaggtggattctagcttgtcgctcttctttcctttccttttcttttctcttctcttcttttcttttcttttctttttcttcttttctttctctttctttctctctttttttttaaggttgggagtgtttgtgaaagtaaacaaacttgtctaaagactctatttttaataagtgtaagaagactgtaacttttgatgcgaatgagacccacttctcttaaactggtattgcagttaggttaaagaggtcttttttgttttgttttgtttttttaagccaacaaataaaaatattataaaacttgtttcttcccagtttcccttgtaagcttattgtagagttttgagtaaatagtctgtgcgggctcatagaccgaagataccacccttcaattacaaagaaccaaaaggaaatggaaaagactccagacctggaactgactgcacaaccatgtcaaaagcaaaccctgccaaaccgtgcccagttgtgctcactggtgtgaagaaagggccggcaagctcagtggactcggctcgcctcacaccttctctggggagacaggctagtgtcggttttgtgtgttctatgctccggatatcttttccccttctgtgggtctgagagaactttttgtttgtttgtttgtttgtttgtttggcagaaggaaactgaccattctaccatgtgcctttgctggcactcgtgcaataaaaatggtgtttggagtgtgcagctgagggagagctggcagctgagtgaggagtggcgttggagacaggcattcaacagtaccagtggcttcccctccctcctttctccttctcccccccccctttcttcctcatccccttttatttgtctttcttttgatttgattctggttacagtgccatacaccttgttacatatgtatatcagaatgtaaaaaaacaaaacaaaaaaaaaacaaaaatttatttaaaaaatatttttcgcaaaaaaaaaatatccttggtgtgtttttgttgatggtgtaagaatttattttcattatataaatgaacctcgtttggggatgtgtcattctttgtacgtgcctgtcttctctggttaggctcatacctctcagcacgggtttgtataaagagatggggatgagagtgtaaagcgggagggaccgctcacggagggaggctaaggatcccagcactgatgcggtcctctgcttcctccccatcctctttctatgagacagcagactcatgattgagcagcttccgccagacctgataaccaaatcacagccaagccgaggatttagaatatacagttgtctccctggtaactacatgtaaatatcagtgacaatctgccttgtatggttttcacagtcccgtctcaattgacactagctcacatgacactttttagggacattcaccctatagtaacaatagtacaagctgcaaaagatgtactcttccagtgtttttcccagtcagtagaaatcagctctgtgtgcacacggactttgacagtgctggctattcagcccacagacagttggaagtggtgtgggaaggatatataatcctacggttttgtacgttttattagagaatatgtatctagagggacttagccactgggaagatttgtagtgccccaaagtttgcctggtgcgagtaagcgctgaagaattctggcatgtctggctcccagtgactacatttgacataaatatttttgtgaacatttgcttacaaatgttacaccagaaatattttgacattgatttctttattcaaatagcttgcctgccaagagtcatttaaatttttctttcattagaaaagtggaaattgaacataataggaactgagagctagctggaattacgttagtctgatatagaatatgaagtagtcaaaaagtaaatctctttttttggcatttccgtactgtcaacagtctttttgttttgttttgtttctgtcaactagagcaaactgaaagagtctgatacacagtgacttgggatgcctggcaggcttgtcattttctaagtctaaaagttggagtcctggtggggtataaaattctctctctctctctcccctccctcctcttctttctctttgcttttttatcatgtcttctgcaaacgaagggaaggactcaatagctacatggacatgatttgtgtgtttggaagtttatgagcttagaggagaaggtctgccttggggcaacaggaatcctgccaaccagcataccaagaattctgagagggactccagtcttttctcctaatctgctctgagtcacttcaccttcgtttcttcttgaggaatgttaatcacttcatgaacccactggatcagcagagccaaggctctggaaagcagagtccccagcattctgagcctctcactagctgcctgcaaccttcaggatggggttgggaagtgactgtgtcttctgagaatgcacagtctatccacctcaagagtcatccccagggcctgtgctgaaggaatgcagtgagctggtggaatgaatccagagtctatctaatgcccagtagagtaggcgtcactgccttggtctgaacagaacaacaactccagattgtccacatttatttcaatagctgatagttgcttttccagtgtcaatgagtctagacagcttagttcacagatgagctcctgctggtgacatttggaccaaggtagatggagtggagagcgaggacggaagctgacaagaacgtgtatgcaaaataatagaggaaacattcttaggctgcagccatcactgatttctactgactgggaaaaacactggaagagtacatcttttgcagcttggactattgttactatagtgtgaatgtccctaaaaagtgtcatgtgagctagtgtcaattgagacgggactgtgtgggcaacaaatgagagatgacccagaaaagctaaagagaataaacagggggaaatgggaaagtagagtaacgagagaatgagtactcgtgttgaattgggatccaaatcatctgaaaactgagacatagagaagcagtgttgatctctttgggtcttctgaggggtaagcatggtgagccaaacaaagatcagactgtcttaactttcaccttatttgaaacctgtctcttggacatgaactatagagatacatgtggaattatttctaacctcaaatctcagctgttctggggcagggcacagtagaagatatcgaagctctggtactccaaagaatgaggaatagcatattctagaactatagtggtgccagttttacccacctgccctttggaggcagcagggactgacagccatattgtcagttgttcctgatttctgtctctggttaccttcatcaatggtgtgaaataaccaggctttggaaacattggaagactcactggcagagtattgcttctgtgtgacatggcctgaaaactctgtgtcaataaggccatgggagagaaaagctgcacatgaaatagaggggtgtaaagatgaaattacaaaggtgctgatcatgtgactggacggttgaggaggagaacaggggagagcgtaagagctgagctcatggctcctgctaagtcaaggtaagtcacagggtcaaggcaaaagcatgctcactataattctccccattgcccttctaaaatgggatggctgctatttgtctttgtttgtttgtttcccccacaacttgatgcaaatttcctctcagacttagtaacccaatgtgaaacaggcaagggaaatgtgggaaaggcagttcatgtctaggatgattttgtcatcgacgtcatcgcgtttggaacctccctttctcactgttcatgctgttcctttgtcctcagtaagcacatccttcatcatggttctttgccttctgaatggcccagaccttgacaactgggcttgtattagattgttttccactcattttattatagtaacaaaggcaactacaaagcacagcaatctaagcgacactagcattccaaatggacttttccttaacccagtaccagcccaggttactcgtgacaatcacaaccatgtcagtcagtatagtaaaatatatttttgcttgtttttgaaaaggtttatttccgttttaatgtgtgtgtgtgtgtgtgtgtgtgtgtgtgtgtgtagtatgtgtatgtgagttcaggtaccttcagaagctagaagaatgtgttcgatgccatgaagctggagtaacaggcagttatgagctggctaatatgggtgctgggaaccaaactccaagagcgggatatgcttgaacagaggagcaatgtcactagcctatgtctgattcttagtgtaaggcacccaaggaagttttaagtgtcaacttctagcacaatggatccatatagcatcccccagtagaggtgtctttaccttaggaactaaaacttctacattccagggtagaaagaacaagctgtgtaagtggatcattaatgacatttgtaagagacgtttgtcctgtttctgtcccttgattcctgcatttaagtattcttagataagtgttgggggttggtctggtgctgctatgtattcaaatgataaatactggccccaagatctggtttataccccccagctgatcctaacatcaaatgatgctatgaaaaccttgctccccaatttaaaatattggttcagtaaaaatggctacagtcagttactgaggagaatagaaagaggcagcgtttccatttactggggctggggggtagcaggtaggagggaaaatgagtaagaaaatgaagatggagaagacagaaggtctccattagatgtgatggaccaggagcaggtgcctgagtgaatagtccccctcccccgcaaaggacagattgctggagcagaagtaactcaggagagactcaaacaggaagtatttggggagaggtgatggggaagtagccagtctagcatttgaaaaatagattaggggtaatcccccactaattgcgcaagagctgattaaataaatccataggactctgcctcagttactggcaggctgagtgggtcatattaataactaatagagtttattaaactccattgacaaggagaaacaacaacatatactgactgatgactctgactttattgcttcttaggggacattactctagccctgtaacatatttccattcgtccagcatagcagtagacttgttagaactctctgcctttctactgcttgaaagtgatagataacatggtaggactaatgaacatgaatctgtttccatacacaattcaccacaaaggaggttccttaaaggcatagtgtggtatgtcgtggtggtgtataagaagtactctctgagtggccaattgctgggtttggcaaggtgtttagtaggaaagacaaacccatatgaaaagtcagtttctatgaaatgagaagaaacttgccctccaagatagaagtggttttgtcatcagatagctgagtaattcccccagagggtggtttgctagtccaggaaatgagtgctgcctcatttggagttggttggacatgtattagttgctataacccaactagactttgatgagtagacaatcatgtgcctaattgcaaccccatgttgaccagcatggggactttgatcagaagatcattgatcaatagagaagggaggctgacagaatggctaagcttatctagtcttaagatacttctatcctaaatccgtgtcttggtgggcaggcaacaatccatcccactaggagaaactgattccttgcattcgtttcaaaactttccaatctgatttactctgccatgtttctttaaagtctttaataagcaatgaaaactgtcactgctgcccataaagcaatgtaggttcatattgttgctcctctctgtgtttagaaaaaaaaaatcaacaatgagatgcaaagttctgcctactggaatgtctttcctttacctctttttctggatcatcacagagtagagatacaatgatgtagcctttcactctggatgacaagctagtatgcaaagctttctttaaacagggttaatttgtttttcaatgactagtccccaagaagttcccatgactctagaggtataggttctaagacatattggagcagacaatgggtctgtgggtcagtgcttattgattggcttgggcttgagagagtgtattccatgcccattgataatgaaatgatactgttcatgctctatgtagatacatgctgggctcaataatgcttagctcataatgggaaatttgggttatattgtaactttatggttccagatcaagcttccagtatcaaatgatatctaaagaaaggatagattttctgaaaaaacaaaacaaaccaaccaaacaaaactactgccatagtattgctcctgaattctaaatatctattctggcatctattttgtgatttgcttacagggaaatggctccatgcagtattgctgtcacacagagagacctttagtgccaccagatttactggatccgggtgttaaaacatctaacatggtaaccttgagccgcaatagagactccatagttctggattttactcaaaaaaatgataaccttttatcacagtaaatgaattaattttcctaaatctaaaagggcccttatgttttcttctctgtggtaggaagtaccacagatggtagaaatttgttactttgtccttaaagaagatgtattagcatacttattttaaaaagatgtatttattatatttatttatttttttaaaatttatttatttattatatgtaagtacactgtagctgtcttcagacactccagaagagggcgtcagatcttgttacagatggttgtgagccaccatgtggttgctgggatttgaactccggaccttcggaagagcagtcgggtgctcttacccactgagccatctcaccagccccttgttatatttatatgagtacactgtaactgttttcagacacaccagaagagggcatcagatcctattatagatggttgtgagccaccatgtgattgctgggaattgaactcaggacccctggaagagcactcagtgcttttagccatctctctagctccctactagcattcttaaaaccactagacgtctatacattcactggtgataagcccctgagtgtttcagaatgtgtttctcaaccttttcattactaagtagaagatagataggttaagagccaagctaagctcattgagaaagagatgactcaggtacccatggtctctgacaaatccctgtgttatctcagcagcatatctacatcagttatttcattgtgctcatcaggcacagtgagtgctatcatccatgcatggtgtctgaggggatggatacacacctacgatccctgtgtactcaattatgatacagggatatcaagttgaaatggacctaaggtaggatagtgatggttacaatattattcattctgaaggcaaactgcttctaatggccttaacttgtgcttcagaaacattttatgtaagggaataataagtaatgtaggattagaaggtgatataggctggctagcgaggctactctagagttggagtacaattacagtcatagacaatatgtagaggaatgggagtaactatatactgtaaatacagccatctggatttcgtccatgctctataaatagctagttcctggtctttttaaacaggtatacaacagccatagagagctaaacatttgctttaccaataggtacttatgggttaccagagccatgttgagtggctccattaatcaaaccatgtctggtataacatctgtaacagaaaccaacaactgaaagacatctttaaaacctactgttccttaaattcatctctttttttgtgtaggacaaattattgcaataaaggaggaacatgtaaggaatgccatctttgcgttttgtctcagttcctgtcgctgtcactaatctgttccattctttaagagatcagcattgctcttgtgtttgctaccttagtaacttgtagcttcataacaaactatatcaaaacctagtggcataaaagaattcaaattgttgggtttgttaatgaatttgtttcaagtgtgttcaacagacaggtcacttgaactataaactcagaaccagaagtgaggcagcttgttggggctggagaatgtgtttccaaggccttgcaagtgcttttctaactgactgggaattcagccagggttgtccactaaataccttggatcctctcctcgaggatgcttgggctttctcatggtagctgctttccaagtgactgagatgaaagttgcaaagcttctaaaatcgtataaacacggatgtctcagatcacttctgcaaaatcctgttactaaataatttacaagctcaagttcaaattcaaggagaaagcaattggattctacctcttaatagcaagaatagccaaggatctgcaaacattcttatcacactgtagccccctttgcacaaccaaatcagtatgtgaaaaatagtttacaggaggcagggctgttggaatgacagtaagtcaggcaatgacatcagcttcctccaaatattgcttcaaatagtgttgtaattcaaagctaaagttgaactgtttttttttttttctcctcccaaaccaagccctgaggataaggataaagatcacaaggggaaggtcgcatcagctgatgactgccgccctcctgcttctgatggtatgccagctctcaaggccacacgactcacagtcttgtctcatccaaattgtatttggacagtatactacatttttaaagttactgatctaagaggcatgcgatactccataattcgtgcccaaatccctgggcatcgttgtgacctttagcttgctatatttcaacgagaaacatgaatgcacccaaagacagacagacagacagacaaacaaataaggaacattatgtggatctgtcctgtctctacatatcatgtgatgcctaaggatttgggaaccaaaatataggtctgccattggcttttggattgatcccttgccgtcactgggagataactgtcagatgtgtcttctggcgggggggagggtgtctcaatttttttttattaacccattgtgtgacagttgaattaagctttaatttctctttgtcttgttttgttttttgtttttgtttttctgaagcagatctcaaggtaggggttttaaaagaagcagctgatgaaatgatccaataaaactggcaagggagagtagaactgaggccaagatggagggaaagggatggataaacaaattggaaagtaagatcttgtttccaatgtagaaagtgaaagaattatcctagtgagggtgggagctgttgcatttgttcatcaaggttccttaagtagacagatgatggatgccagtcccagtacttccagtcttcttagagggaagccacagaggccagaggaagtcctcagggaatcagaaccacccacacttcgtcctaggaatcataagtgatacaaaaatgaactgaacatgagtgtctgggctataggccttacagcaagtagagttcctctgagcccttcacttctgaccactttcccagtcccattgaaaaggataaggagaggacttgtgggaggataaggatgggttgtgtaggaaacagatcttgtctgcttctttcctttcttcttgaactcaaagacatgatttcttaccagctggactctgaaccctttattctttcatgtcctgtctttttcaccctctcacttttcttttttattgaaagagttaaacttgctgaaaacccagtgggcttctgaagagtctctagtctctagtgttgccttcctacgttcccaccctaggcctcagattcttcagtttctcactcatcccacacccattcccttcgtctggccggtgtgctttcggtaacttagatgtctgtttggcaatattgaaagagggtaaatggggaaatgggctgaaaaagaattcatcagaaaaaaacactctaggtttggtactaaactcagaccgaagtcttgctcatcaggctgctgagcactccacaggcatgcatatcagattgatgattactttaagaaatgattaaattataattatttcctcatgactcaagtgtggatgaatgtgaagtttaaagagaagcatgaaaaccccagtcaatgatcttttcttcattatcacgtt

SEQ ID NO: 188 - DNA, 1977 bp, Mus musculus
aaagtaactctgtgttgctgctggggatcaatgaagctgagtgaatgggggcgcactgcgcgagcgcatagctggagcgggcgccagatggtagagggctacgcttattgatgaaactcttgacttcttgaattgccagttttcagcctcctcatgcctccatctcctttagacgacagggtagtagtggcactatctaggcctgtccgacctcaggatctcaacctttgtttagactcaagctaccttggctctgccagcccaggtagtggtagccacgctcctgtccttgccgccgccgttgtgaccctcaaggctgcgaatctgacgtatatgccctcatccagcggctctgcccgctccctgaattgcggatgcagcagcactagctgctgcactgtggcaacctacgacaaggatcatcaggcccagactcaagccattgctgcaggcactgccaccaccgccataggaacctcgaccacctgccctgctaaccagatggtgaacaacaatgaaaacacaggctctgtgttaagtccatcgggtggggtgggcagccctgtgtcagggactcccaagcagctagccagcatcaagatcatctaccccaatgacctggcaaagaagatgaccaaatgcagcaagagtcacctgcccagccagggtcccgtcatcatcgattgcaggcctttcatggagtacaacaagagtcacatccaaggagctgtccacattaactgtgccgataagatcagccggcgaaggctgcagcagggcaagatcactgtcttagacttgatttcctgtagggaaggcaaagactctttcaagaggatcttttccaaagaaattatagtttatgatgagaataccaatgagccgagccgtgtgacaccatcccagccacttcacatagtcctcgagtccctgaagagagaaggcaaagaacccctggtattgaaagggggactcagtagttttaaacagaaccatggaaacctctgtgacaactccctccagctccaagagtgccgggaggtggggggtggtgcatctgcggcctcgagcatgctacctcagtctgtccccaccacccctgacatcgagaacgcagagctaacgcccatcctgcccttcctgttcctcggcaatgagcaggatgctcaggacctagacaccatgcagaggctcaacatcggctatgtcatcaacgtcaccacgcaccttcctctgtaccattatgagaaaggcctcttcaactacaagaggctgccagccacagacagcaacaaacagaacctgcggcggtactttgaagaggccttcgagttcatcgaggaagctcaccagtgtgggaagggccttctcatccactgccaggccggcgtgtcccgatccgccaccatcgtcatcgcctacttgatgaagcacacacggatgaccatgactgacgcttacaaattcgtcaaaggcaaacgaccaattatttccccgaacctcaacttcatggggcagttgctggaatttgaggaagacctaaacaacggcgtgacgccaagaatccttacaccaaagctcatgggcatggagacagttgtgtgacaacgggcaggacggaaagggctgtgctctctcaggagacgaaaaggagggaaggtggattctagcttgtcgctcttctttcctttccttttcttttctcttctcttcttttcttttcttttctttttcttcttttctttctctttctttctctctttttttttaaggttgggagtgtttgtgaaagtaaacaaacttgtctaaagactctatttttaataagtgtaagaagactgtaacttttgatgcgaatgagacccacttctcttaaactggtattgcagttaggttaaagaggtcttttttgttttgttttgtttttttaagccaacaaataaaaatattataaaacttaaaaaaaaaaaaaaaaaa

SEQ ID NO: 189 - DNA, 1452 bp, Mus musculus
atgcctccatctcctttagacgacagggtagtagtggcactatctaggcctgtccgacctcaggatctcaacctttgtttagactcaagctaccttggctctgccagcccaggtagtggtagccacgctcctgtccttgccgccgccgttgtgaccctcaaggctgcgaatctgacgtatatgccctcatccagcggctctgcccgctccctgaattgcggatgcagcagcactagctgctgcactgtggcaacctacgacaaggatcatcaggcccagactcaagccattgctgcaggcactgccaccaccgccataggaacctcgaccacctgccctgctaaccagatggtgaacaacaatgaaaacacaggctctgtgttaagtccatcgggtggggtgggcagccctgtgtcagggactcccaagcagctagccagcatcaagatcatctaccccaatgacctggcaaagaagatgaccaaatgcagcaagagtcacctgcccagccagggtcccgtcatcatcgattgcaggcctttcatggagtacaacaagagtcacatccaaggagctgtccacattaactgtgccgataagatcagccggcgaaggctgcagcagggcaagatcactgtcttagacttgatttcctgtagggaaggcaaagactctttcaagaggatcttttccaaagaaattatagtttatgatgagaataccaatgagccgagccgtgtgacaccatcccagccacttcacatagtcctcgagtccctgaagagagaaggcaaagaacccctggtattgaaagggggactcagtagttttaaacagaaccatggaaacctctgtgacaactccctccagctccaagagtgccgggaggtggggggtggtgcatctgcggcctcgagcatgctacctcagtctgtccccaccacccctgacatcgagaacgcagagctaacgcccatcctgcccttcctgttcctcggcaatgagcaggatgctcaggacctagacaccatgcagaggctcaacatcggctatgtcatcaacgtcaccacgcaccttcctctgtaccattatgagaaaggcctcttcaactacaagaggctgccagccacagacagcaacaaacagaacctgcggcggtactttgaagaggccttcgagttcatcgaggaagctcaccagtgtgggaagggccttctcatccactgccaggccggcgtgtcccgatccgccaccatcgtcatcgcctacttgatgaagcacacacggatgaccatgactgacgcttacaaattcgtcaaaggcaaacgaccaattatttccccgaacctcaacttcatggggcagttgctggaatttgaggaagacctaaacaacggcgtgacgccaagaatccttacaccaaagctcatgggcatggagacagttgtgtga

SEQ ID NO: 190 - DNA, 59817 bp, Homo sapiens
  misc_feature (8546)..(8720): "n" at positions 8546 to 8720 can be any base
  misc_feature (18044)..(18090): "n" at positions 18044 to 18090 can be any base
tacatttttagtaatacaggacaggattgcaggacacttggtacaattctcatcttttaggctatgctttgctctgtccaccaaaggggaaaaagggtgtattaggattctctagagaaacagaaccaacaggatgtgtatgtgtataaatggagatttattctaaggaattggctcatgcaatatggaggctggcaagttcaaaatctgcagggtgggcaaatgggctggagagccaggaaagatccaatgttgcagttaaagtctgaaggctgactggcagaattcccattgctcaggggaagtcagtcttttgttccattcaggccttccactgactggatgaggcccacccaaattatggggggtaatctgctttacttaaagtccacccctttacatgttaatctcattcaaaaacaccctcgtacaaacaaacaccttcacagaaacaagcagaataacacttgaccacatatcccatgatccagtcacgttggccacagaattaaccatcagaaaggaagattgcactagcttaaacatacaaaggggaagttctgcatccacacagagagagacacaaactactccttataccatgggactagcggaacttgtctttgaggttctcctgggtttaaaaagaggggccccaggtgtgtgcttgacatccctcaactgtacaaaagcagttggcgcctgtctaagccagtgcagccttccttaacatgcaccaacacagacagccctattctttcttttctatcccaggaggtggtggggcccagtgtctgctgaagtcaatcagaatgagttttagtaatatcacattttttttttttgccagcaaacattcaacaacccctctgtaaccagatcctattctatttaatagcttgtgaaattgtaaatttctggaaatagcaaaataccctctacttgtctgctctttgccttctttctgcccaaagttacccttcccaactctggagtcaaaatacaaactaaattttaaaacaaaagcaaacaaaacaaaacaaaaaacccagtcagcccactgttctttttgcctgcctgccttacttctttcagtccttctttaacatgctgggcaagtttgatgagttaaaatgtctgcctttaactcctctaatccatattcggggggactcatgtattacatgaagattaggactgtgttgaaaagggagtccaaatctattggcatttctattctgcagaatatagaaaagacacttcattggactgtttgctattattaatccaatttaaggtttagaatggcggttcatagagttgcttcagttttcctaattactgggaataggaattgcaaactgaagcatgaaggagctaagagtccttgtgaattatacatcttagtttactactgtagaaaaatgatacagtttttctgtcaccatacctgcgatggtgagcactggcagatgaatgaagcacagcgccagctctctggctactttctgatccaatctatttatctttcttgcattctaaatttttgtgacctgcaagttaatggcaaaaataacatttgcttcttttctaacatttctacttgaactaaaattttagccagttccaataaggatttttctcttacctgttgaataactcgaattgactagacctgacctgatttggattaatttgaatacccctactatatgcctgagtggtactgtgggctcagtatttagcatagcatagacacttaaattcacccagaaagggtttcatccaccatgtttgtacattcttggcccttgctggtcatgagtataattacaaagtgtttgctttatttaccagctagaccagggaaaacactgaaccctccccctgggtgtgaaatccaggtggacttgggcccattcacagagcattagaaacaggacttctcggggtgctgctccccacctaacccagaatcagtagtggcatttcctttcagagcacaaccaccaggaagacgaagaactcactgatgtccaggctcaggtccttgattaaatgcctttctgaagaaagctatttattggcatcagtcacatgctagagaaaataaacactggacaatccgtctgtcagggagataaacaccaggaaatgcatgcctttgagaattacaagaaggaagatgttgaacgagaaaaggaagataccttcatcctcctgaaactcagtgaacaagaagaggaattttttctaaacattgaagacaatcataattgcaaagagcattgaccaaaacaaaaatcaagtacggtatggagtataatgagatggattataatgagaaagatgctgatgttttctaaattctatgggaaagaaatggagttaaactgtaaagagggaaatatgatcacaacaaaacaaaacaagtggtgtgtaaacaacgtagctccccagagatagacacttggttaatatctgcataaataattcaaaagagtagtgaatttagggactttggaggtttctaagtttccagctattacagaaggccaaaccagtagctagaaagctatcatcagatggaccagggtatgcctctagaaaaatgaataattcaaaggtacgttcttgctacaacctgaatatttgtgtccccccaaaattcatatgttgaaatcctaaggcccaaggtgatcatgggggcagaaccctcatgaatgggattagtgctcttataaaagaggccctagagagaaccctcacactttccaccatgtgaggacacagccagaagttagtagtctgtaacccacaagagagtccttatcagaacctgatcatgctggcaccttgatcttggactttcagcctccagaactgtgagaaataaatttctgttgttcgtaaggcattcagtttatgatattttgttatagcagtctgaatggacaaagacagtatgtttaaaaaacattctcagttcattcattcattcagtcactcactcactgaaccgaagcttaatgagttcaaactacgtgctagctcccgggccaccggctagggatgggacggcaaacaagacatggtttttctaatagaagtgtcataggctcttccttgaatttaccagtccaatccgcagtagcaaccaagccattgacacaatttagggcaatatttgagactgttctggaaataaagtggaggtctggatccattccccaatgtggaggctgcggttgtaagagtgagaccacatggagattcacgtcatgatggacttagaaaagttcagaagaaaacaaaagaaaaaaacagcaaattcttatgaacaggcaattaaaaatatactgcagtctggagactgagggggacatgatagaagtttataaaatcacaacaagagtgaatgaaataacacaaaatggttaaaagcagatgctctggtgccagattgtctgggtttaagtgttgactctgctgctttctagttttgtgaccttgggcaaattatttaccccatctgtatttctgttttctcatctttaaattaagctaataaaaaagtacttacttatagatcgatgtggctgtgaggatttaagtgagttaatgcatgtaaatcacttacagcagtgcttagcacagaacaaaacacttagtaatatgttacctatgattattttttcccaaattctagatctttaaaatcagttcagttaatattcaattgtaaagataaagtacgttatgatgcactttgttgtctaaaggaacttcttatatgtagaagtggtacagtctgaacctactaggagatgctgagaacgttagattaattctttagtgttagacctgaaacaagtcttgagggggtttatgaatgctttgcgtgcatgtttaccttataactttgcatccttcagtaacacagttggacccagcctcctggggttgagaaactggcgctgacagcatatcgtaatgataaaacatgattgctcagtttagtgaaggggaaaatgttaacagtctttgatgtagcaacacataataataacaggccatccgccacagaggagggcattgttggagacccaaggccagtgaatgttttgtgtgtgttattttcataaagaaaataagtttacatccatggtccacacacttgggcctgaggcaaaatcctcttctgagaaagagcagcagatgtttgtggggttacaaataggggagcagtgaaggggaagaaaaaactgaaagggatctgcttgcctaaatgaagacagggagcatattaattcccctaaccagccagtcacctctgtgtgatcagtagaggccagagtgaaccttgaaaagaggtctgagatcaatcatgctttggccatgccatccagtgaaattgctttacaggaaaaaaaaaaaaaaaaagagagagaaacaggattaaaaaacaaaacagaggatgggcgtggtggctcacgcctgtaatcccagcactttgggaggccgaggtgggtggatcatggggtcaggagttcaagactagcctgaccaacatggtgaaaccccgtctctactaaaaatacaaaagttagctaggcgtgatggtgcatgccttctagtcccagctactcaggaggctaaggcagaattgcttgatctcaggaggcgtgggttgcagtgagccaagatcatgccactgcactccagcctgggcggcagagtaagactccatctcaaaaacaaaaaaaacaaaaaacaaacaaacaaaaaaaccagaaccaccacaacaaaaaaatcccaaccaggatcctttctttaactgaaattttactttggaagcccatgaataagacatatatctatccatagctatatctgcatctgtcaagtgtgaaggtgtggaggacaagattgtggtcacagaggctccaccagttcacccctgctcccatttctattgcctcccacttgcactgatgtcttttaccctttgtatataaagttttcaagatccaatgtgtattttaatcttatggcacatcttaattcagactagccacacttcgagtggccgacacatgtgtcaaatgaccaccacactggaaaatacagatatagagccttaaatggctcagagccttttcctgagtcacaagcacacctgcccatgaattttgtaggaaagaactgcaggcctcttgtgtccaaactcatagatagtgggacaagcacatggccctgcctctgtttccatcattacagtagccactgtcttagtccagttgtgccgctataacaaaatacctgagactggggaagttgtaaggaacagaaatttattgctcacatgagttctggaggctgggaagtccaagatcaaggtgccatctgcaggttcactgcctggtgagggtccaatctctgatttcaagatagcaccttgttgctgtgtccccacaggggaatggaagaaaactaactcactccctgaagcccttttgtaatggccctaatcccttccatgaggcctctgccctcatgacttaaccacctccaaaaggcctcatctcttaatagtgtcacactggtgattaagtttcaacatgtattttgggggaacattcaaaccatagcagctccttccttcagggaacacttcttatcagcccttccctaggcctggagagtgttgctggatgttttgccaggctggtctcaatgacctcaaacacttaccatgccactttcctattcctcagcttattccccactccttctggtataatatcatctttatcctggatgatttttaagttttctccaagccattctctgccttaattctagtacctccagaaatctatcttgaccttgaggattattttgaaggccccaccttctgccattaccccacacacttaaccatttaagtgcacaaaaaagaagtaatttaattaatacatttgctaaatactatccatattatatcttatatgttggcctaagttattgtcatcttttgactttaatacatagtacttcagctgaaacagtcaatatttttcttatgatgtttgtgggaacaaagatatgctcaatacaatcatgttacaacatccagactgaatgaagatgcttcactctttctttgggactgaaactaacattaacgctctgctgctggttattgatatacagatcagatttgtagccattggctgactagcattacgaatttaagtctcagggcattatatttcagtgtagtattttcacatttatcgctcaaaaacaggaataaaatcacttcttcttgtccaaaagatgttctgaagagtagtgaatggaaaaaaattccatctataatctgatttttttcaccagtcttatgacttgaatataaacttagagatgcctaacttaaaaaataactacaactttgcttatattcataatctggtaattattccacatttcaggcttgatatatgataaggaattttgccatctttcccaatgtttcagcctggatggcttagattcttagtcaactaaattataataatctactactttgaaactataataaaacaatcatctcattacaagagttacatttcttcttgaaattacttttccattttgggccttgtgggaaaagctgttaagaactcttctgcaattgtataaatctatactttgggcttagatgttgaggcattagaaatgaattcatcatttatagatcatatatacctttaaagataggcaccttatttcctaaagcaagtaaattaatttttttttccactgaatgccttttatcagcaggggatcttttttcccccctgagcgcttgaatgagttccctttttcttctgagttggggtattaccattctatggataaatgaagacagagactggatgaacagatataacagatagagtcagaatcagaacttagaactctcaaactctgagttaatgaaaaattttcccataattgtctatgtttagggaaaggtaagctttcagccttccagctccagatagatcaagggtagaacctctgggaagttcttttctgatttgtatagaaattacccagaacccaagtttcctgaccataacctgttgatcttcaaacatttaagaaccaaatggtgtgccctaagcactctgctattatcaggagggtgaattgacgtgtgtgttggtgtgtggatggagagaggtgtaaaccaaaaataaaattctaagcaccccccacgccccaccccctgcccaccccgccttcccaggcaaccctctgaacggactaatttgtcaaccagggctcttgtaaaatttatcctgaaagactggttcaggccatgaagggatgtgagggtgggacgtgccccattcattatatatcaaccaacggactaatttctcaacccaggctcctgtaaaatttatcctgaaagactggttcaggccatgaggggaagtgagggtgggatgagccctgttatatatcaacatggagttcaagtctgataagaaacattttacaacctattctctctgaacctgctgcctggagacttcatctgcataataaaactttggtccccacaagctcttatcttaacccatacgttcctttctttgatctcaggtctttagacaaactcaaccaattgtcaaccagaaaatgtttaaatttacctatagcctgaaagcccacccgctccttagagttgtccagcctttttggaccaaaccaatgtatttcttaaatgtatttgattgatgtctcatgcctccctaaaatgtataaaaccaagctggaccccaaccaccttgggcacgtgctcaggacctcctgagggctgtgtcacaggccatggtcactcatatttggctcagaataaatctcttcaaatattttacagagtttgactattttcgtcaacagacgttacacaaaatcctctcctatgtaagactatcggatgtgtacgtgatgcccgtcgtaacactggtgtgaaaagctggactggggggtatgtgcctgcatgtaagtggaggtgcccaaggggatttctcttcacagctcattgagcatagctgacttgctagctatggtctgacacctcctgatttcagatctgccctgaaaacaattacatgaatatgcccctgctactcagtatactactaggcttggagtctgaagtagacctccaaaccccatccaatcaggtaagggagaaaaacgatagcccaacattccctagtgctcataatgtattattccattatttcactttttatcccttctctcacagataagaaaagaaaaagctctacttctttagggttcttggacgtagactctccacagttcatctggggttgttcatctccacttctttttgtatcccagggcaactttcctgcagtttccctaatgagaatattttccggactaggcaaggggcggcttgccccgccccctactcttctccctgaacaggnnnnnnnnnnnnnnnnnnnnnnnnnnnnnnnnnnnnnnnnnnnnnnnnnnnnnnnnnnnnnnnnnnnnnnnnnnnnnnnnnnnnnnnnnnnnnnnnnnnnnnnnnnnnnnnnnnnggagaggcggcgtcacctcctccacgctcctccggccccattcaatctagctatttgcactcggctctggctcttttccgccagctgcggctgttccagaagcgccgggctgccggtcctggcctcggcaggggccgtgcgggaccgaggggtggcggccgaggcatgtggggcgggtgggttgcgcgctgctggcacggcgcggggacccagcgcgccaggcgggaaaggggggcggcggcgggcggggacccagacccggaggggcagcgggcgcgtagcgggccccaggacgcccggccaggggattggcctctgcaccgctgctcagggcgcgtcccttgccgcctctggcgtcgactcaagcctcctcctccgagcagccctcagtggcgccgccttagtgctctgggtcgagccccgggagggttagcctggggacggcaggggcgtgaccggggcgcggaagtaggtgagcagcagggcggcgcgcggcggtcaggccgggacagccagaggggcagcgacatctgcgggcgggcgcttcccgggcggagcagggccctccggaggacgcaggccgcgtcgaggctgaagggcctccctgtccgggacggtcagctgccaagttcgggcccttagcgcgtggccccgggccgcggctcggagcggaagcgtcgcccctggctgcgcgctcatgctggtcctagcgcagaagacccggcgaggtccgcgaattttggcttagcgtttgtcaagtcacctcgagcgactcggagagaacccggctttcccactagggacggtgatcgcagtctctttcctttagaaagttactccgatacttttgatcatctgtccatagtaaggaggaaaaatagcgtggtttgtccccgggtgagggagtgttggaggatcccgtccagtgggaagagccagttttagcggagcagcgcgtccagcccgctgacacttcagcctggtaaagggttaactgcatcctgccggttcggtttacatgtaaatagagagcagctgctccgcgcggccccggctggctcttttaagtttttgattggttgccaatgacatcaccgcccgtgttttaacaccgaggacccagagcagcttcggataaaccctccttaaagagatgaggccacgccttcttacccgccccctaggctgcccattggtcgcggggctctgtgaggtagcggtcggctttctccggattcttattggcccaacccgccgtcggtcggcggcgagtccgccccctcagaaccttacatttacagtgtagcaaaagagaaagtaactatgttgctgctggagatcaatgaagccgagtgaatgggggctgaatgtgcgagtccatagctgaagaggagcgccagatggtggaggaatacacttatttatgaagtaagtggaagtcaccgcgactactcctgagagcccgggactggaggtggaggattgtaaggcggtgcttgtgtgagtgtgagtgtgtgtgtttgtgtgtgtgtatctgtgtgtgtgagagagagagacagagacagaaagatagagatgcgatgctgacggaggagctacagcaggtagggttataaggttccggccgttggctcctgctaccctgtgcgtttactccctgcagtctacttggatttggggcgaagaaaaaatgaggtttgttgggatgctttgcggcagttttaaatgctcggggctcattagtgcgctgtgtgccgaggagtgaagcggggggcggggggatgttaagtgctccaggaatggggaagaagcattctctaaccacttaattttctctccagctcttgcctagtggtggaagggagaggggatagctcagtatttctctgggagattttctgggccagactggatggtttcacgggcagtatgtacgcccgaccctctgctgcagggatgcaggtctctctatacactccgtgtgtgtgtgtgtgagccttgaactctgtgtggaggtgggggtcccagcgcgtgtctctgtgaacacgcttatgcgtccctctcagaagaaatggtatgttgatcctggacgtgtcctaccaggtaacacaatagcaaagactttcaccgcttggtccaaccgggaaacagttatagcttctggaatagaactcgctcttcagaaaaaatactacgcaagggaaggggggttgactccttcgctcccatccaaaggtgggtgagagaaacccgagtcgttggagatctgccgacgtgatgggtgcgtgccccgtgtgcgcgcgtgagtgtggattccgcctgtgacactttggttctgtgtcagagaatggtgacggtcgtgtgtagacggatgagaatggtgacggtcgtgtgtagacggatgatagatggcatttttcctgatagctcttaaagttcgtttaggtgagcgtctcttggcgtggggtttggcgtctttgctatgtgcatgtctaatagaagaagaagagttagcaagcctgagttgtagagtgcccctgtgcctacaggaggaaggagctgtctttttgcagacactctgaaatcagagatagatccggtgggcaacaattcactgtccctttcaacgagtacaggctaattgggaggtcctctttacggaatgagtactcttgaaggggggatatctgtatgggattgaaaccttatacaacgtggctgcctcccattgagagaagctctaggatgcacagtctgtgccagccagggagatgaagaggggaggagagcccaagttgtcctttccaggcaggaatgagggcgggggcaggtgagagagcaaagggtgagggatttgccggggctggggtttccaggtttccagatctggctccatggcttgagatttcgttttaggacaccagttagtagtgaaaaggggaaatgcagattaatttataagaggccaaaagacaacatgtgaggttttagtatgactatgttgtgcttttcaaaggaccccaatagagaatggaaggcaagaatagctccaagttaaagagattcacttaaggggatttgcagaaagttgacatccaccctgatgtatatttagctgctgtacctttctgtgaaccatgccagtgctcttggttacccctttgcctttgcagcgagtgagggaattaaatggcaagcatgcaagggtggacaaatgggtctttctcagatgtttgcagtgtacttctgcccgagagctgaggttcagaatagatgcctcttaagagcctcccttctgtcttcagcttttctaattatttgtgcttataccttctctacagctgaacttttatgtaggtccaggaaaggttgttcattaacatttacaacattacatccaaatttaaccttagacttagcaaccaaattgattggagccctcaggtttgcatcctctttgaatacataaaaatgaatttcaagttttgataatggtatgataaagggcaattaggacgactttgctcagagggatgcaaaggtctttcccagggattggatgagactgccttttgtgtcacgtgactttattctttctttcccccttccccttctttacagactgtcttgagttcttcttgaattgccagttttcagcctcctcatgcctccgtctcctttagacgacagggtagtagtggcactatctaggcccgtccgacctcaggatctcaacctttgtttagactctagttaccttggctctgccaacccaggcagtaacagccaccctcctgtcatcgccaccaccgttgtgtccctcaaggctgcgaatctgacgtatatgccctcatccagcggctctgcccgctcgctgaattgtggatgcagcagtgccagctgctgcactgtggcaacctacgacaaggacaatcaggcccagacccaagccattgccgctggcaccaccaccactgccatcggaacctctaccacctgccctgctaaccagatggtcaacaataatgagaatacaggctctctaagtccatcaagtggggtgggcagccctgtgtcagggacccccaagcagctagccagcatcaaaataatctaccccaatgacttggcaaagaagatgaccaaatgcagcaagagtcacctgccgagtcagggccctgtcatcattgactgcaggcccttcatggagtacaacaagagtcacatccaaggagctgtccacattaactgtgccgataagatcagccggcggagactgcagcagggcaagatcactgtcctagacttgatttcctgtagggaaggcaaggactctttcaagaggatcttttccaaagaaattatagtttatgatgagaataccaatgagccaagccgagtgatgccctcccagccacttcacatagtcctcgagtccctgaagagagaaggcaaagaacctctggtgttgaaaggtaatgcccctgctcccttcccaagcacggtcctgattagccgggttcactttgggttttctcgtagagtgacagcattctccttaccctggctaccaaagaccaaaatagactttattcttctcttcccttctatgctctttattgttttggtttagtaagaaaaacccagcagcactgaactggaagccagaagatctgggttctacccttcatttgggttctaatttgcattgtgcaagtcatttcacctctctgggactgttttctcatctttctaaaaaggggctttatacacaccagatggtatctcaagtcatgcctggtctgctagctctattccaatcaatcactagttggaaagttattgtctctcagacttaaccaatgttgatggaacagaggaaggagcaactatggtgaactacaagtaaacctacaggtaccagttcttactgtgggaaattctttctctttctcacctttctgaccagcttgacttttatgtggtttataaagtgaccttgaagaagggcagagcttcttattctaaggccccatataaagtataagttcaccaattacatccattcctctgccaaggctccaagggaacagagacgtttttatgaaacactccccaacccattgttttttctggcctcacctgacaacggttggcatcatggctcctcccaagatggagtaatgggtcacttgccccagtatactgaatgcagaataactgagattagcagaactgagctctggcagaaggaattattcaccactcttctcggagcaccttccataccgtgttgcctaacctttccaagtagcctgcatcctgtgcccagcctagttgcacctctttgccctcagatactgacttttggggcactgtacatcactctcattcggcatcttttacctggtggtggtagtgagagatagtcgtcttctctcttctctcctcttgtgttctgagccaaggtacgcagtttctgggtcacatctccaaccagtctcctaaagtgtgttgaccaaaggtgttgctgagtttgaacacattgcatatttaaattgcaataggacatgtgggtgagcaagttagttattttgtctctatgggacagctttgccattctccttcttgtcttcccagtggggcattctgccttttgttaagcagtgttctgggaattatagttctgaattccactgacacaatctcctcttcccaccctccgctctcctcaaacttgccctcatggggctacactaccacaaaggcacatctctccttagggctggtgggctttgctgggaaggagaacatgaaagaattgtatgtagagagttccagaagcttctagacatttcctggtcgtggtggttgtggtgggttttcttgaggtcacaaatatgttcagatttcctccatatagctctgtattttattgtttctgtattcttgtatggttgactttgagtgattcccaggatatttaccctgctattgtcttaccataatcttgatgtgtctagcctcttacaaatgagaaaatcctaccgaggaatttcccatttgtaatagtttgtcttggggagcaaagaggaggatagccaatgatcatgatgatctcctcttttctcacgcagagcaggtgttcatgataaaaagcaagtcttttgtgtcttcatgatctgaagagaggaaacaacacggatcaagatgatcctagacctcctaatcatggggatgattacaaggagttgcagaccctactctctattttgcagtgggtggagttgtggataggggtgacccatcagtcattgagaaatgaatctcctgggtgctacttgtgaaagtgaggatcctctctccctttcctgtggatgcagctgagattctggacagcctagacttcttcctcagtgtcagagtaagattgcctcaatggggcggggcaggacacactgctgacctcaccactgggcgccctgggcagccactgcgaggcctcgtcattttcgagttggtgagacaccgcggcagtcgacttggaagatgctctggtggtagaggttagattatttgtagttttgggggccttttcttcaaatatctgggaatttcattgaaaatatgtagttcaggagtgaaggggtctatattctactttataattatcattatcattttggtatcttttgggagaatggcctaaaattgggaccaagatggaaaagaagggaaaggaatgggtcaatattagaatgcccttcgttatcctttcaacttggtaaaccagagattaataccatagcaccactgtggtgaaagacggggtgggcattccccaaaggcatgaccagcagacttctctcagattcttgagtgggtcaagcagaccattctggtctggcttctcctctcagatttatttgagtaatcccctcccttggtgataagattgtgtttcagcaagagtggtagtggtaccatttcggaaggagtaatttttgcagggaagttggtgggaggggggcatagttagaacataaggaggaaacttctaaaggcttgttagtttattttcagagatttcagtacaatcttgggtaatttatggctggcccatctgatgctctggtttatgtttgtaaacactggttgctaccctccctgtccaagatccttgtccccctgtctccatgccatactctccatttttggtgctgtctgtcaagtagagcggctgctaacttgccattttagtaatgctgtgtcaggttgggaagaaaccgatcagaggcatggcagcccctgggattaagttactgttctaatttacagtgccctccctgttgtgacctatgctagaatctatgttttagtctcatcttctaaagaataaatggcatcagacctgtgcttctcttcaacctggtgaaaatgatccaaatgaataaatatttagggatttgtgaggtctttgaaagaattatattgttttactcaaagctgatttttaatcaactaaaacttgctttctagtcaaactgagtaagaaagctgaacaattctagaccatccataacgagagctaccgtttttgctataaagtttttcaggctccctttcttttcagtaaagctgggtccagggaaataatttgtcatttacttaggtaggaagaaatagtctactgcccctttttcttaaagacagtatatgccttcaaaaatgttattataaacattttcaagcatatagaaaagcagaaaagtgtgtaatgaacatccatacacctatcaaccagattaaacaattatatttttcctatttgctttctcttttctgttgaaatatttaaaaatatagataatgttttaatgtatttaagtatgtttaatgtgtaaattaatgtttcaaattcaataaagctggaaatattttatagtatactatgaacattttcactcgtaaacacttgagtgtcatgtacccatttttaagtgcttttcaacttcgaatccctctgtgactgactggcagtcaggtctacagaggagcttccctccctgggagtaggagggctccaggtgcctccttggggtctgtgtgtcccccttcctccctggtatgtcagagcccatgcctctacttgctctatgctgttgtaaaacaaggaatgaccaactgctacaatctttataggactgctctgtaccaaaggcctttactgggggaatgtgagaagaagagggaaatggtttaaaaggatgatccatggggaggatttgatcatgcaggcagttaggcctttatactataaaacttcatcactccttagaattgagcaccatacattgcacacttttccctagttgaaaagaattctgaaatatactcttattggcaatagagttctatgacaaagtggatggctaggctcagaaatcagagacctgtgaaaaatattctgtttctgcccttttttcgggggtggggtggggaagggaataaaagtctccccttttctctcagagatgttatgaggattttaaaaaatacctgaaataaagacatatctacattcataaacgtgctgttgttattctgagcctctggttaacatccaaggctaaaatgtcaaacattagccttgtagcaaatgatggagaaatcaaggcagaacttcggatctagtcagcctgaatgctagccttggctcccctctaactaggtatgtgcccttggggaaggaactgaatccttcagttccttagttacctcattaacaaaaagaggatataacaatagctatctcaaagtgttagtttctgaaataaatgaattaatgtgtgtaaagtgttcagaactttatacacatacatggtaagcactccataaatatggtagaatgtttttattgatattgattgaaaggaaatgatagtgccagtacaaaggcaaattttgttcctaaggagtacaaataacaagctaggtatagtagagtgtgtgtgttgctatggcctaaaaataacttggtgactgttaactaatttaagttgcatagagttggagtgccaagtaattgcaaaaacatattgggccaggaggctggagtaatttgggtatatccagaattatttgttttagggaaatttgtaaaaacatgataataattctgtccaaataatgtcccataacaaaagcataaaactttttagctttgctttttgttgcctctcatcatctcatcaggaggatttatttttggaataaggattgtggactgactataaaagggtagatggaaggaggggtgcgctggttcctgagcctagggttgtgttgagttagaatgtgaaggaaaaaggagggaaggagttnnnnnnnnnnnnnnnnnnnnnnnnnnnnnnnnnnnnnnnnnnnnnnnttcttgcttttctgttcctcattcacgatgtgctcagcagagtgaaattttgctcacttacacctgggttcaaatctaggcatttccattgaccaactgtatgcctttaggcaaatcagggggcctctcagaggccaggttttcttcattgtaaaacagggacagctccagcatcctaggttgaaacaaggtgatacaaagtacctggcatttgatggctgtcaataaatcaagcctctggaccctgctctcctactctcatgcactaatgtaagaacctcttacattgcaggggcaggggtattggggaggatgggcaagtcgttctaagcacagtactgtgggagcctgttaagtatgaatactcttgcccttaccaattcagaacagttaattaacttaatcatccagcttgtcatggacaagttcaagaaactcctctcctggcaataggagacatgatttcacattagaaaagcaaagcaggggaaggaaactgaataggtaaagcactttgcctatttctgttttcaaagcacgtgtgtataggagaaaggagaagggagaatggtgaatatgtacacttttctacttggtcctttgggcaaacccatctgaaggtctgacaaaattacaggagcagaaaaactttccgtcacatactcctggtgcatacaccctcagggactaagtgggagcttttgaccagtagcaaaaatctagttccttaaaccctgcattatcagaagccagaacctccaagccccagcattgctgaagagcagtttgggcatgaatgtgtgatatatcggagtgcttaggcagtttaatccaagttggttgaaaaagatagactacatattaaggagagaaattctagttccaggagaggtcatctcacctttttggaactaaagaatcccagctttgagaagagcaaggaactttagagggcccctaatccagtagttttcactgcaggctgttcattggtatcacctgaaggtgatttataacctatgatgcccagttcgtgtgtccagaaagcctgattaaattggtctggggtgcagcctgcacatcaagatttttttaaagctcccaaagtgattctaacaggcagcaaagtttgagaaccattgatctagtccggtattctcattatgccactacaggaatggggcttgtccaaggtcacatgcatgattaattttagagatttagtccttaatgttaaagtaggtcttgccaggttcaacagattcaatagatatcaacagactgaggtattcgtatgtatcattatttaataacaacagaatctaatatatagcataaaatataagattttttgagtactgatgccttttttcttgaattttgagatttcagttcagaactaaaaagaccaaagtctgaggactttcaaaaccagcagttcatggtctatatatttacctggatattagaatatggaccaaatattaatgttgatttaatctcttcatctggggaacctagtggtttaagctgttaacctagtggtttcagctgttaacagctatcaaaacaggtatcaaagaagcccaaccatcttaggcttctagggactttttggtaggtggtctccacagctgtacaaacttgtgggcagaggagattcatttgtttgttcaataaatattgttgaatgcctttggtgtgctaggcactaatctgcaggctgggcaatctgcatcacaatgcttatcattcaaatgcaagaaagacaacatatatggatgggaccagtcttccagatcctttccatcttggaaattgtgttcatgtttctattcttcatcttcttctgccacacaatcttatttagggagtgtttcatcttcacgaaattttgttctcctgtgaagcacatgtttgtactttttttttctttttcttttttaagaaatagccagccgggtgtggtggctcatgcctgtaatcccagcactttgggaggccgaggcagatggatcatgaggtcaagagattgagaccatcctggccaacatggtgaaaccccgtctctactaaaaatacaaaaattagctgggcatggtggtgcacacctgtagtcccagctactcgggaggctgaggcaggagaattgcttgaacccgggaggtggaggttggagtgagccgagatcccgccactgcactccagcctggcgacagtgagactctgtcgcaaaaaagaaaaaaaaaaaaaaaaaaaaggaaatagcctagccttttctaaatatgtcatgggccaataggatttctttccaatgtcttgatctgaaaagaaatgattcattggtttttaatgaaaaaataaatatatatgccctctgtgcctcaaaagctcagggctgacaagtctcctctgtgtgggagagtgaaactttgtaatttggaccccctaattttgtacatgttgatgataggaataagggcttcgtttattttcactgcatgctctctatggaaagaggatgtgctaagcaaacaagcattgtaaacaatatttcagaggcaaggttttggcctgctttaaaaaaaaaaaatgtttgcaagtacaattaaaaaccagtataagggacaggggtgggatgaaaacctgtctctaagattacgaagcctgcgttatttcccctaaatccccttcgaggaagatttgaatccctcatcaacaaattttcattgattatgtttctattatatatactgtagactctatattcacgaatgtaatcatactcattcagaaaaatataggaagagaaaatgagtatgacctgtagcctgaatttcattataaaagatttaaaaatatacattttatattaaaattgatgtaatcttttaattatgaagtctttgattctttagatgttttcatccataacccaagagcaagatcttggcatcagttttttccaggttatgtctatatcatctattattacttaaaagttggagttacatatagatatatagatatatagagagttatagatatatgtaattttttttcattccagtcccccacccgagcaagacccatattttatgtaacttaaaagtaaagaaaagaaactttgagcgtatgtttttggataaggaaatgagctgtgcaggcctagtactttcatataagataaaggctcttacctattctctgaatctggcaaagtagagaatcacttacagaaagaaaaggatttgtggatgcatcaaattatctgcattgcccttaatgttttatgtgtggtaaaggcctactcaggccaccgcccccaaccctggcccccgacttgaatttcatagaacacaaaacaaagcgcaactcttcctgagtgcttccacaacgggattttgctttcttgccttaccacttcagaatggaccaccatcaggcatctgttgtccattgcacacatcaagtaaacagattaaactgcccgagccagggggtcgcatcaggcctgtcctccctttgaggagcttaaacctctcgtgttataatgcgaactcgactgatcttattttgtgtcctgaggtaaggaggcagtcaccgttttgcatcagaacatcactatccggttccttaatatcttatatttattttatggaagaaataatctcacattctttgtatcacagccctgagcttcactaccattgagctaaatattaccagctgttgctactggcaagagagaagcaaaaaacaaattgaaaggagaaagaggaggggtgggggagtggacagaaaagaataacatgagggttgagggtcttagggtgacagcaacatatcttctagctcccagacctgagttctgggctccagtattgaagactgtgagtcattttcttcaatcattacagtgtttcttcctgtcttaaaagaataagactagacacaaacttctaagagggccttccctgaagagatagaggacattttctattgtttcttttaatttctatttttattaaaatgctatgtttttatgataagactttaaaggaacgggtcttatggttctcatgaggtgatattttaatctgccagcagaacatcagttaatcacatagaactactctggctctgtgaccaacctatcatccctgaaattagaaaattattttccagatagtttggaagaaaaacaagttaaaagctattgaatgctttctagatgctgggcattgggctgtcatatatgtgtcttatttagttctcagagaagctctgtgaacgtcattttatatcctgacttttatagctcaggaatctgaggaacagattaaatattttctcccttgttattaactagtaaatgagagaataaggattgaaatccagttcttatgatttcaaagcccaaattcttttcaggctggccatatctatttgcaagtctcattccttatggtggctttagttgtgctttacctctgtggtgccttagttataatgccatcttcctttccccatttttcttgtatatcctcaaataaaaattccattgctaaggtgagtagcctattctgtgtccttagagtagactggcttcccagtaaccttgcctcaaattatatcccagcttttggatactttaaattttggtcatgacagttttttaaggaataaaaatttgagcaaaacaaacttttgaaaactgtgataattctaacatatatgaagtatttcttacatgccagactctatgccacaagtgttatgtctcatgatccctttccaatttacatacgagggactgaaactcggagaggttcaggcacttgtccagtgttactcagctggtgcctagtggatcctgggtgtagctctggtatacttctgctcagtttgcttttgatatctggaaccttagaattcattctcctagtagcctgtggatagaaggatgatatttcctgcttttgcacacattaataaacccactttctggagtaggaagtagatgaacaaaggtaaagaaaagtacaagtacaaagttaggtaaaaagaacaagaaagaatctgtgacgagtatgatgactacatcctaaagactctaatgccaaaggtatttgattgtttatgctttatattcattatctgtcctattagtgtggatgataatgaaaactatagattgttttccctcaagtaggtgaagaaagaatctctagtaggttatgattgccctttgggaaggttagttatcagggataagtgaacagatcctatcaaaccatttactgtttagtttctctcctctcctttcctaatctttcttatctctgttcttcccttctacagtctaagcctacaaatatagctcaggtaatctggaggtgtggcaaggacagaccctgggaaaaataataatgaacacatttgaaggacagcaggatggactccttggaatcctgtgttaggggcagcattcatagaggcagaatctgtcttctgacagagcacccagcttcacacagtgaaagtatgtgactgtcctctcagatatcaactataaggtttcgtcactaagttcattttatgctgctaaaacagaatacctgagattgagtaatttacaaagaaccataggttatttggcttatggttctggaagctgtgaagtgcaagagcagggtgccaacatctggcaaggtcagcccatggtggagggtatcacatgatgagcaagtgtgtaagacagtgagaaaatggaggctaagagttcatcctttttattaggacccacccctgtgatgatccactccatggaatggccatgcaattatggtcttaatccactcttgagagtggagccctcatgacctaatctcctcttaaaggccccatcttttaatactgctacagtgacaattaagtttccaatacatgaactttgggggacatattcaaaccatagcagtaaggtcaccccaaacactcaggtcctccagtgagaggggaagggagggggacatgggtgatcaaggcagtagaattagtgaatggagaacaaaatttaaaaatctgagcattttttattctgaaatataaaagtaatcaattttaagaaagcttaaaataaattcaaggagattaacttcactgatcataagttctcacatttacatggcaaggtgagttttctgaaccacaacaaccccaggatgactttagaaatgttgaaaaaccacagaattatagtccattgcacagcaagcattcacttactctatgttgaattagaaaggaaagacatttttcaaagaacatggtgttacagaattgtgagagatgttatcaagcatttgatctaaccatcccattttacagacatagaaactgattacttatccaggaggatataaatagctattagcagtactggcataggattcatgtttcctaactctcagtttagggtgtttagaagcccaaccagtatataatcctttggattagtatctgagttgttgttaaataagcaaatcttgtgggttcaagtattcagccaggtcattccataatttttctcattacctttcttaggagcgtatatagtgactaattgaatgagccggctgatgctcccttatatttgtattcagtttatatattttcttgcgaagggagtatagtttggaggttaagggcacagattctggaaccaggctgctgagtttgaattctgattttgccaattattataattttggacaaattcacttttctgtgcctctgtttgcttgtctataaaatggggagggtaatggctcttttctcatgggctcaattgagaattagataacatatgtagaagtgctttgaacaataacgaatgcatactagctaacatttattgaaaatcaaccataattataatattgaatctctacaataataattcataatctgcttatattcaactgatatatgagtggtatagttcagtaaaatgctttgatgtcaccactaatgcagtacaagtaggagatacttttctgatgcttggtagatctttttgtttaaaagtttggaaaaacccagtgtttcttttggggtggatagataactacatagggtttttttttttttttttcctgaaatagtgctgtgctgaaaaattatatgctatttctatgtaaggaaatcttataaaagtcttagcagaaacactttatgtatacttattgttaagatattaagaacattttagaaagaaaaacataatattactaatcccgccctgactggcctagtttcatttttacatttctttttgttctctacccatatatgtgcatgtttttcagggtttctcacatagtaactgaaattcattttcactttatattgcatgtacttttgcttcctgtgttgtgatcatagattttcttctttaatgctgtaacctgtcttattaccacattttacttacttgcctattaatataaattaagattgtttccaaggttttggtatgacaagagaaacctcttgaaggaaacccttgtttggaattttctccaccttcccacccaactgcactccccatttagagaaatgggtactagctgccattttgggtgctagttgccagtttgagtttatttttccccccaattctctttcactttttaacttctgcttttctttcctgagtgtaagatccaaatacctatcaaagttgtgagtttttagggacatctttatccttgaccacaggtcttgatactgatcctgaatgtgtgtgtttaccacatgtcctgtaaggcacatattgcagatcttggacctctttggtggatagagtgaggacatgaggaagcaccactcagcgctattaaaaatcagaagctattgtggaagtgaatgatctggcaaggctaacaacggctccttatttcataaatatgagtcactcccagttttacactgtagataaaacactctgaaagggacaataaaagcagcaagaggtagatttagtgagatgctgagtagatgtgtttgtgtctcccttcctctcaacttttctaaatcctgaggttttagtgcagtgctgaagtcttctaggggcttaagcaaacacaggcagcaaaaacacatcagaatggaaagataattcccattagttcattttgccaaattgaggtaaagtgccctttaaataggagataattctttgacagataattagcttgtcttccttgataaaatatgtgaattggttgagtatattataattaattttgcatattatgtaaaaatctattcatgtacacttactaggtgaatctcttaattcctaccttgaggatggctagaaagccccatttctgctccagtgaatagaaagaactggaggaatgctgtggttatggagtccaggaagccctctcttacaaagattgggaggagctgaatgtggtatatcattattaaaagacacagagacttcatattaatatatgcatttattaaaacaaactttgagaacacttttaggcctgagaatgagatgctacaaagttgcctaaataattaccttgaaatcaatctcttgctagtgacattcttctggcttcccaatgtggagctttttccagggagtggagtgagtgattggctgggtgcagctagctgttggctgggcggtggctgtgggaagtagcctgagagggcacagaacagttgctcaatgactcagtgagtcaaagctcctctctgcagtttttcttccccctactccttaagccattctgagctccttcaggcatccccatgtatctgcgcactgcttttggggtgtcttttctcattcaaagctattgtcgtggctacttgatttggctcatattaaaacgtgcactgggagatgttggagtgctgaaataaaagagcatgctgtagttaatcgatcagagagcctctcttctccaagttgaagtgtttcttttcctgaaaatagagtggctatttgatgttccatgggagccgaatgacttcctggtgtagtgtggcttatagcaccgtagattttagtcattggtcactacccctccatgtgcatgcacacacattcacatgcaaacaaacacatattttagttaacatttgtagaatgggaacaattatgacactgagcattaactcatttaatggggatagcaatagtattaaatctatctgcagcgtccaatatagtagccttgctgcaagccaaacgtggccattgagcacttgaaatggggccagtccaaacagagatgtgctgtaggtgtaaaatatataccagatttcaagactttatatagaaaataatgtaaaatatttcattagtaattgttttaatattgactcttgaaatgatatttgcacatgttaagaaaaatatattagcaatattttacctgtttgtttttactttcttgaatgcagctactagaaaaaaaaaatgcttgttattatagtagcctgaattccatgtctatcaaatgttgccgatctcaatgtggtaataacagtattattatccccactttttagatgaggcaattgaggctgagagaggttaggtaagttgcccaaggtctcacagcacaatgccaaattcagacctgcctgactccagagcccacacccttcatcactaagaaactgttgtataatagagaatttgtctggccgttgtcctcagttcctgggaaataatttctaaacccttggaactccccgagtgttaggagtgtctttgttatgcatgatgagccccttggatcacacctgtgtttatggtaatgcgatgactcaggataagagtttatcatcagaaagacatccacatgattagaaggtcagggctttgtattagttcatcttcttcagcagaagagagtgggactgaagattgagttcaatcacaaggccaataatttaattatgcctaagtaatggaacccaataaaaactctggacaccaaagctcagttaaacttcctagtgaacacattgctgtgtcagcagggcaatgtgtcctgattgcacaaggagagggcctagaagctccatatgcaggaccctcccagatattgccctgtatgtgtctttatctggctcttcctgatttgtagcttttataataaaaactatcatcataaagatagggcttgtgttctgtgagtcattctagtgaattatcaagcctgaagcattgtagaagccacagaatttataaccagttggctagaagtgtgggtggcctgggaacccctgaacctgtggctagcatctggaagtgaaggcattcttatttgagactgtggccttaacttggggagtctgcactgactctgcttagtcagtttcagaattatattgcagtattgcaagaatagactgccttttatttggatgtatgtattaggagaacagcagctgagagagctaagtgctgcagcttaacttgcttatctctgtaacaccatttccttggtgacaatggccatttgcattctagacttggaaaatgactcaatctttgagcaactgcttttgaccactaggatcagttgggaggcaggcaggcctctgagaccttcatactcaaaacccttcacgctgtaatctctggggcctatttcatctcccagttggcatcatgttagcggtggtgacaaacatatgtgttggcccctctttgacaccagggattcttaagtattggttttgggattgagatgttcatgggaagctgacacagggtgatactatgggtaaggagtatttcgattttttgttgtgttttttaatcatttgccttgtctggaattacgcttttgtggtatgtcctattacatttcataaacaaggtatttagctcaattgttgctttttcttttggggcttttgtttggatttttaagccaagatccatgtgttttatttattttggtttagtttcttcatccctgcttaaaatagacactgcctcttgtctgtggtcctggtatccactactcttctgtttcctgctcaggcctggcccatgttctgcaaggccctcttaggtcaccagctcctagaaagttgactcctatgagtatctcttggggccaccttagaatgcagatttctaagaaaagtccaacataaactctgcagttattgggagaaagtttccgtcaccagtgaaaactaggaataaaacaagattttggaatgtataaaagaagcctctttcaaaaagaaatcaatatgacttgttttttcctaacatgggccagccctgggcacttttcatctgccaccacaccaggcctgctcttcagaggtgttcagctttaagactagggacagttcacaccagataactatgaggcagtgttctctgccactcattgactgtggaagtctcagtcccagtttctgagagggggagagcaaattcatcagaaccaactgaagaggtacagaacatgaggcattcacttctcacacagtccctgagcatctcaccttccagaataccagaggcttcaaggccctttttctacctttcaagagcgttatagcgtgctattgctctttgagagatctagggctgtaacagcccttatttttagaaaagagagaactcctgtgtttgaagaaatagctcttatgatatgatcgtgtggtttcacatggtcttaagttcaagtaacttgcccaaaggtgcacagttattaagagggataagaggaactccaaattactgatttcagatccagtgttgtatcccttcaaaaggagatagaagaaacagggccacccggggttggtgaagatactgtcagaatcatctgttactgcttaccacatctaagtgagagggtcagcaagctcttgagagggcccacctagatcttagcttgtgtataccctatactgagcactgtgcccccatttcatatttagtgcttaataaatgtatattaaactgaattgagggcccctcctgctgctcagtgacatccctcagggtgagtttccctcctgagccttcttttccctttcatgactaccttccatgcatctctaccattcatcactcatatagaatgtccaagaagtaggggcgaggagagaggagaaaggggtaagaggccaccaagtgtgatttgccttggatttcagccctccctggaaggtgcccatttgtcacatttaagggaggcccagcacccctgtaaattgcctcttcctcataagtgtactcagccctccttcccagccttggaatgccaggatttctaaatccttgtgctgaattcacctggcgagtcctgcacctgactgtgtgagttacagctggatggcattgttcagctcaatcttcagtgtgttctgaaaatgtttcttcttccagtcctgtcactgaatttccctaaagttccttcctcctttccctcattagatttctctttggggactatttttttcaatcaaatctcgcaaatccatagcataatgctgaacagcatataatagatgctttacaataaactggtcctatctcatctcattccagtgttcaatgaatctaaaaatatttaatgagcacttactatatacaattcagatgctaaacagtgaatacttagaatttctattaataactacaatgtagtagctgatttaattcttgcaataactattgttgcctgttaggactattattagctccatttcagggtacaaagaggtgaaacagctttgtcaatatcatactggaaagttgtggagacagtctggccctagtgcaccaaaccattacactctatttcctctaagagaaagaacatcttgactttcttggggtccacactttaataagaacaataaacagggaagaaataaataggtaacttcagatagcgataagtgttctgaagacaatgaaactcttaaaaacttcatgatatgataaaagagatttggaagggtagctgtaaattgaatgtcagggaagacttttctgagaacacatctggtctgaggtctgaatcatctatgtgagtctaaagaaaaataaatttttatcctaccatactttcggaacacctctgtggatttatgccccctacacacagagcagtcttccagcagacactagcagaatgtcttgcaacttaattttgactctacctggtgttagcttcagaccccacaagttgtggctcagtcctacaagattaccccaccttccccacactgtttataaatcagtatttctgcaaccccctccctgagtcccattaattttctaggacagttcgcagaactcagggaaatgtgtttacacatttattataaaagatattacaaagaatatagatggacagtcagatgaaggagatggatggggtttatgggggcttcattacataggcatgattaattacatcattggtcattggtgatcaactcaaccttcagtccctgtctcctccctggaggttgggggatgcggctgaatgtcccaatcctctaattaagctgttttaattctggtgaccagctcccttcctggagctatttaggggcccccagccactagtcatctcattggcattcagaaaacactcataacttcagagattccaggggttttagaagctatgctacaggaaccaggggcagagatcaaatatatattttttcatatcacagtatcacagtgaggatctacaggaagggagtttgcggaagagggaacagcaaatgcaaaggcctggaagtgggaagcagagcacccaggctttacacaacctctgacagctgattttgttcttgccattgttcattcatgtcatatcgtaccatatcatatcatatatatggtttatcaaggctatattgaagttatagaacaccagagttgggagaaacttaaagattaccctaagtcctgattgtataggggtggcaaaagaggtcacagagctagaacccagtatctttttagtgtggaaggaagggctgccctctgagtccttgctgtcagggcttttgttaccctgtgcaaagttagacatggcttcaggggaaatggtcgaaagtctgatggtgccagatacgggatgcatcccaggtcagcgcttcattctgcgtgccccaggttgaactgaccattacttggctggtccttcacttagcctcaagtccatgttgacaatatgtaattccagcccacctcctcagagacaagcagtgtttttaattgttttgttttccccctaatctcagaaggtggtcacccaggcagggacatgctagcttttttttttaacccagtgtaattttgtatgtctcttagtgcatggagacctcaccttgcttcaggtggacctgtcaaagctcagccctcatggtacggtgtgatcattggacatggctgagtccatgtttaaggaaagcccatgccttttctttctgcaagttgatcctttagtactcagccttgctcattatattcaccaaacatagaatccagctcagtgacttgaggaagttgttgctatgccttttgtgaagtgaaaacatcggttcaggaaaacaattcaaattttgatgctgacatttgatcctttcccctaccacttcctgaattccctaagccagagctctttgacctccagatcctactgaaatacacagttatacatactgtttgttggacatgggggttttattcaaagcaaactcagatgcagcatttttggctgggcacttccatacatgattttagcaatggaaccctatccaggcttcacctgtgtaactttgtcttgcttactgctttcccccacccctcctgtcatggatgtttctagaggaccttttgtgaatgtaacttccaatgggaatgtttcacagtagaaatatgctctcctgtgaggctcgcatgtgacatttctgaagatttatttaattggactttacttaaatcccattgggaaacatacttttgctgtgaagctgtgatgtgtttaatttggggtctaagataaatgttggtcctcggggtggatggttgagcaatagttttccttttgtacagtgggtttgtgtaatgaatagctttactgggctttcctctgtttgtttgtttagcaatgcttcattatttaaacttctgcactgaaaggcaagaatgtttttagacattctttagagacttaatgcagaatatctggttgagctctcgggagaaatatggctttgtgttttatagcactctcctcctgttaacattcctctctctgcagcttcccaggatgatctcatggatttttccccctcctttaatccgtcttgatggattaaccagtattaagtttgagaccagtgagcaaaaaaggtggagccctaacatggtatagagtagcctccccagtacgcagaatgtctccagctaaaatattcttccgcccagaaggatgccacatggaggtcatgtgccagtgctgatctgaaagggcatatatctaatgaggagggaagtgtctttgggagaggagtgggcttctgtgcgtgcatgtagctggttcatggaactaaggttctacaaggcttactgcgcttgccttttataggcatgctggtcctttcagcacacccccaccccctgctgcccccgcccccacccccaccaccctgccacccccattctgaccttggaccatttttggcttggctttaaggtatgacaccaagttgggttggctctcaggggctttgttctcaggaagcccacaagttttagtgtggctcttcaaaagtaagtattatacgttgtatttctaaaagtaagctacactgggaattacaagtggcactatattcatttgggctgctttaaccaaatgccgtagactggatagcttaaacaacagaaagttattttcttatagttctggaggctgtaagttcaagattggggtgccagcatggttgggttctggtgaagcctttcttcttggcttgcagacagctgtcttcttgctgtgccctcacaaggcagagaaaaagagacagcaagctctgtgttgtctcttcttataaaggtactactcccatcacaggagccctaccctcatgacctcacgctggggattagggcttcagcatacgaatttgtgtgtgtgtttgaatatggggaggagagatacaatcagtccacagcagccacaaaaaatgcattcagaaaaggaaagggtatgaattttgcccaggatttggagtgtatgtaaattacaccatttggtaaatcagtgcgttctctctctctctctctctctgtttcttttcccctcccccctcttttcttttcaaacacatattgatcacctgttgtggactttggaacactcaggagcttcccactgaactcagaataaaacctgcctaagaggccctgtgaggagggtccctgcctcccttccttcccctctagcccttctcctcacccgcctcttgcccagtcattgtgcctccccacatttggctcccttgagtcactcagaggttccctgagttccctgcctttcccagtgtggtgttccctccctatgttctcctggattccgtcccctctcatacctcagagaggctgtccatgaaccccaatctaattagtcccctctcatagcacccaggaactggacagcgtcttccgttatgacttatcttaatttgtgactgccttctggaatctgtgtttatggttgtcatatgtttcctcctgatggagtggggaggggcagggaaggggcctctgcagcgtgtcactcacctcctcaactcccagaatgtttggggagggtttgatcttaaatacaagagattataacagtgaaaaatgtgttaatgtaactggcatgtctgttaacaaatcccagacttgatctgagtgtttatggtgtgcatttctccctgggaaccagttggtctgtgctaacataggtaaagtttagacacgtaccagaaagaaaactgaacttgcaagttttcaggaacatgggggctggaacttggctgtctttctgtcggcccctgacccctcacccccagactggatcttggtaggcacccttcttagccattcacttgattgaagcccaaaatcctttcttggaaagcaaaaatacttactcttattttctttagttggcatttttgttagtgagaatggagttcaatagaagtagacaaaattctggtggaaaaaaaaatgagactacacaggctgggaggaaggtctgtggatggaggggacaactggaaccaccagaaacatctgttctgacccttctattccagactaggattaagggagagcagaaggcacttccctgcccctctggcagagggactgacttgaagtcaactatgcccacaacctgtcttcaggtggttcttactgaaacctttgtgagacagaatggggagggtgagttaaagatggtattctctgcactagcagagccttactgtgtgtttggctggcagggatgagtgctcaatcactcttcccagcccacctttgactttttaaaaataggtctaacaaatattctgtggattcgtttgaaattcaagcatcaaaatgtattccaggtagaagtctctctttcatgttttcttcccatctactgctgatggatttatgagagacagagaaggtgtagggagagggagagaagggtagaagaggggagatggcagggacagggagagaagagggagaggggaggggaggggagggaggagggatcagggtagaggagcaagagttggggaggagaggtgagggagagaagagtggagaagggggcaaaggggatagagatagagaccaaacccaaggccctggtggggaagaaaccagagagagtcatagagtctcactgacttctgcaaaacctgaggggcttcctggctctgggaactcttgagatcttaacagttcaaatcctgctcacataaaagtcatctgctcattaaaataacacaaagctgtttaattgttgtctttgtggaaaattacatgactgtcatcagctgttgcttctggcagtgctttctgttctaatgtaaataaatgaggtaacagatttaaagaaacaggctgtatttacatacttctgaggtatcctctcaaaacaatctgcctgtgttattcaaatacacacaaattaaacttgtggtagctcaaacattagttattcattaaagccttaaagttgaaatggtaggaggggggcaagagaactgcacctcccttcagggggtaggaaccagaggctgacttttctgtgtggactgagctactccagccggcggaaatccaatccccagctcttttctataccaattctgccctgaggcaacttctgagccaggaggggagggtggtgagagcagaggggaatctttaaagctctgacaaaaactttccagggtcagcatttcttggaaggcctccaattaaactttattttcaattttcataaatcacaattcctaaatcattggatgtttctgactcagtttacttttttgaggtaaatatgtgggcaataattttttaaaattcttcctattgagggcatggcaaaggttttatcaaacaaggaaggaaacagtatattcgaaaatataagaaaaatgacaagagacccctccaataaacaagttaatgactggaaaatgtagaagtatatggaacaaaaaatggagaagaaagcacactgctaattatacaaagattaggaagtagcgaaagtgactgttttagttcttggtaagtgtcattgtcaagtattagcttctttctggaatgctgggttttttttaacgttggggtgggagggaatggcacatcatctgagagaaacaatagtaactattgaagtggctaccttgtctgggttaaataaccggggttcgttgtctcacaccaagaaaatttaggacatagacacacaagaggagtttagaagcagaggtttaataggcaaaagaaagggaaaggaaaacagctcgctctttagtgagagagaggtgacttcccagaggaaaaaggccgactggtggtggatgtgccagattttatagtctggcttgaggaggcagtatctgatttacatagggctcacagattggtttgatcaggtgtgaggtttacacagcactcaggggaggctggtcaccccaccctaatcttattatgcaaatgaactctccccttgcctggcgccatcttgtctgctccttactgtacacgtggccggcagagaagggaagatggagccgccattttgaacatgtctagtcgcaggtaattctttcctgctggcatccacacgtgcgagctctcagtttgcttgtctgtgtctgcagctcaactttacaggctgctctctgttgaaaatgatttggggctgcttttcattaaaaggaaaacgttacggaggacttctgtaccctcactatctgcctaagtaatttcttcttaactcctgtatcactatgataccaaagttactatacgatgacaactcaagcaatgtctatttcatgtaagcctcagtattctatattatgttgttttgtccagacaatccaaagaaaagactattgttaactcaaaattcaggcaaattctggtatcaacttttcagaatttttttttctcttaaaacattactaaatactacttggttagatgaactaaataaaaatgaacaacttttattattggaagatagttttgggagggctattctggaaatgatttcagcctatcatttatcactaggaaaacaccaggaagatctttttattttattaagtttttgtaaattatttccaaaaagaaattgaccacctatctcaatacctctttccctgtagctcctattggtatctaacatatcagcagtcacctgtcttcatgtgacttggggctaattcctgtgtacaaagggatttaaataagactagtcctgctctccaaggacctaaattctattaaagctcttaatctggatatacacagaaaggaaaatacattttaaaagaatatgtattaataatgcagttatagttgtagaatgaggctgcatgtatacatataataagttgttgaaactaagtttttatagaatgactctgagaaaaactgtaaacacctcaacttattgaggaaattgaggtatgaaaaagttgtgtgtgtgataacttttctgtacgtccatttcaaaaatttctagaagtatgcatatatttttagagaatataccagaaatgtatttttggctattcgatatgcctaaaaaatgtcttttttttcaaggcttctgaaaatcgtagacataaagaactaaatataatgaggttttcaagggagaccacactaaccaccagccccaacccccactctgcatgccacttcctccggcagtgatggagtgtagactaggctaacagcactgagtacacttttagcagagcagagctacagtgggctgtcctcatggctcctgctttgtcctccctctctggtgatgcccttgcatggggttgcctctgcaggatggtctccttttcctactgctctgaagcaactgtaccagcatcaaaagttcatctctagcaacactgacattgacccctgtagtctctggtcatcttcctgcatctgactacctccagtgctagttagctttgctgctccatttgacagtcattcaaatagctgcagggtttgaatgccttcttaaaataccaggatggctattgtacacacaaaatcattgaatcattacgacagacctaagtagtagtatcctattttatagttatggaaagatagcccagaatacttcaataactttcaaaaagtcacacacttggcatgtggcagacccactattctaaatccaaggcaaagctctttttttttttttttttttttttgctgctttatatatcatccactgtcttttctagagttggcttttaagatatatctgtagataactgtgtctccttcacacaggaaaaacccatgaatggagggactaacttatttttagatatatcttcctaaaagacttaataatatagcaagccaaataatgtggatgggtactcaatgggattcaagatcccattatgttatatgagtatatctgaagttttatgtatatgtgtgtattttaagcttgtgatacttccttgtttatgtcttttcaaacataaggcatctcacatgtaagccagaccacactggtttgagggaagcagtcaaatgacgtgatcataagaagacttctctctgactcatagtcagcctcctaaatctctttcttcccctgagtaagataaatacttctttatctcttgtttcataccttatacctagtgagacagcactcccattcaactctctctgcctctgtttgatagggcctccctttactcttcttgggaaagaaatacaagttccctgggggcaagatcctaagacaatttaagtaatacttccttgggtattttacagtaggaatgattttcatcttgaacttgaaaataccctactgtaaaatacccaattcctactgtaaaatacccaatcacatctatggagtataaagaacatttcatagaaaacaagaagtagaaataatctttgtggatcgagctggtacccaccaccaccccacatgtttctcctgttaagataggtgatattctgccctgaaacttatgaagtgactctgaccctgtctttgaagaagatttcagccttggcagcctgacatcagctccagttcatccaggctttgttcttccacagattcttgtgcttatagaatcttgagtggctctgatgttctgtttccatggagtatatcatagcatccatctgttcctggtataaacaaaatagtatccaacttacagcaatgtctctcccacttataataaaacacctaactctcatgtagcattttatccatattgagagctctgtgagatagaaattattatattacaagtcacagatatgtaaactgagatgcagagacatcaataacttgctcaaggttacaaggtaagtgataggagtcaggagttttaactcaagcaatctggctccagtctatgatcttaaccactatcatcaaggtactgttttactttaaaagactggttactcagtaagaaaaactaggcaacagagaggggtgatcaatatgcttatagcaaactgtagaagagtccaattttagcctacacccctccccctggtctttggacattacttctgtttgctgaccttcagtgagagtgttccttaaatttctggaaacagctcactttctagcttagcataagaccaaaaagggctgtccacctttagagtataaaaatctcttgcttatagattctgcatttggatgtggtttctttaactcacaacccagcgcattgcttctgaatcacattacagaggactcttctgtttctaggactgcagtcgccaaaacagcaacaggagctgaaatgcatctataaagagaagtttcccactaaaactagaatccattgcttcagtaggactgtcactgaactgaccgtgtgttagaagaaactggcaggcagtatttccacatatagttctttaggggtgctaggtattctttgttgctgccatttagaatcaatgtactgaccatactcattttggcagagaacctacttttgacataagctttgaaaatgtttgctgcccccccaccccgccttgcctcaccctaccccagcattgttgctcatggctacaatatgttcgcactaataactgcaggctcttgtgcacataaggaagttagccaccttggtagaaattagaggaaaggaagaaggagggaagaacagttttattttcaaaatccaattctgtggaaaaaccagaaatgcaaagacagtgtttgttaggaaagctaggaccaacaaagtgaaatcagatatatttgtttaggaaaaatagggagctgttgctttctttatgttaaaagtatgttttgcaaactttaaaactgctcggataccttggttcctaattcttttttgttaaataaaattttaaaagtaaaaactcaggaacattagtttacttatatagagtctttatattaagcagatttttttttttttagatctttaaaatggtagtttcccaaagtgatgaaaagaaaaagcacttacaatgtgctggacattgttttaaggtactttattaaccactttaatcattacaacagtacagtgaggtaggtactattgttatccctgttttgtatacagggaaactgaggaacagacaggtgagaaacctgcccagggtctcatagctagtgtttggctgtgctggggattcaaacccaagaagtccagcctcaatactccttctctgaatcactgcactgcacttagggctctcatggactatgcgtgtgcatagatctgttggaatttagaacaaaggtgatgatattgggggtaataagacattatttatcgaatacctggtcgtgtatcaaaacctttacataggcttcctgaactatgaccctgatgggtagatgatattacatccacttaatagattggtaaactgaggcttaatgagggaacctgacttgcacagggtctcacagctgctaggaggcagaatcataactgcagctaggtgtggtttgtctctgacctttgctcttaacctccatgctacactgctcctgctttgtttgttaattatcatgttctaatattcttaaatagtaataaacataacatcatcagggttcctcattaagtgatcagtcactttggcctctggtgatacttgatggggtagggtcggaggaaagtaactggaaaagaaaaaccagattagctttactcttccccctcccctccagatttcaatttcaacccttccccaagagaagaaaacaatccttcctgcagacttctctggaaaaagccaccactgtgagcttccactcgttgttttttactttaagcaccgtccacagagagagtttttaactgcagtacagagctgtgcataagccttatggaaaactgatgcccaagttgattagcagagtggcagttgaacaggagactatttcttcagacccctcaaggagaatttccttgtttaccttatatgtttaaattgtaatatctccttttctctccacccccacccctcccacctccaaatattataagaacagagttcctacatggcttaaacatacaatgcacccatacttttgcacataagcatgctctgtgatttggagcattctgtgtgtctgtctcaaattccctcctccccccactccgccacgggtttttttccccccattaggcaaatggaaggcccatgccacctgttagcattacatcattggctccccagaacacagttgcaccaaaggccttaaacaaagtagttcttcttgtattgtttgcactcaaagagctgatatcatgccaactgatgtcattgtatgtctttgtgtaactgctatggcaactgggcaggtggggagcctccagctgatgtcattgagaaaggaggtgtagaggcagaattttaaaaagctggacgctgcttttttctgtgtgtggggttttctagcatgtgttggtttttttttttttttttaaactagctgcttttaagacaaattacagcttgagtaccctaaataagaacagagaggtttttcccctgcttttagagccttcttttgaatttgttttattgttcttccctctcatcttatatggaaaaatgtaacaactgccttttttgaagaaaaaagtgaattaggttcccatcacagaatctgtgtggaatttgggtttttgtggaggcgaagctgagcagattttaactcttcagaatcccttttgtggaggctgtgatgatgacaatgggtagtttttatcttatttattttttaagtcttcactggtgaagttattttccatattttctttcttctacttcagaattatctcttcaggttcaaactttattgtcataattgcctagcagaataaactatcatatgtaagggcagaggttaattctagaaatcaactgaaattcgtatatagctcttgtttttcttttcaaaaagctagggtaggttttgacttcttactttcaatgagtaaagtgaacataatattgccctttgagttttctttggatcataaccataccttaaggaaaatatgatttctctcttttacacagccagctccgggtccattggttgtgaaaagtcatgagactcggtctaggttatggtctggagtttcccgctgtggtttgtcaaagatgagacttgaaatggagaagaacatatgccaggctcagaggctagtggacagatagacttcctgtccttattgcaacataaccgtctcttgttcatgctttgggttttctgccttatctcctggaactatcaagacagccacaagccatctgtctttgagggtagatgttgtgttctggtggctttcagctaataggacttttccacttccccctcttttcaaagggaaagccagagtgtatctagttctgtttgagtagggttagagctcagttggcactaataatgtcaatccagattttatagcacttacatgtatattattataatttgagctttgtaataatcctttgggtttatctgtgcatgccattgtgtgtaaaaatattagcagaaaatttaaacaataaactatgatccgtaaattccctaatttaaacaattgttcgttttttgtacagttcttcagcttttggtcaatgttttttacttagcttttaaaaaatttaatattaaaccaaaatgttttatttattttcacatcctttttgcaactactcttttaaaggctacataatactccgtggaatgaatgtaataactttttttcttttatttttgtgttttacttggcctttttaaaatatatataaaacagataacattgtagtgaacatctccatatatctagctaactatctttggttagatgatttccctaagatccattcccaaaagtgagattgcacttgttcaggggaaggtttgcattttaaaaatggagaaataagcacagtttataagctttttatactagacccataactcgtgggaggcagagcagagccgtaagctcaaaagcatgcattcacacatccaaaagaggtttcttgatgggtttatgtgcccacaagccttggaaagtcgaggagtaagcaaccgcgctgctctcacattctgttctactgaaagtcagggttgataaatgtcagggccctacgtggagaatatcaaaaaagattataagagcagtccttcacaccccaccctggcttgtcttttccaagtacttctctgctgatttcacctgtgggcaatcatataaataatataaattaaaatagtgaatgcctgctgagttctactgtgtgccaggagatgtgctaagtattttacacgtattcatttatctcaggctcacaattgcactcaaagggagacaccatcaccctcagtttacagatggtggaactgaagcacagagataaatgaacttaagtaatagtgtcaggaaatgatggtacccagattataatcaagataacctgtctcttccaatgttcctgcttgtaaccactctgctgtattgggagcaaacttgtccctctgggtgaggtgagctatgaagggtgcaagacatgctcctgtggtgctgagattccacccgaggaggtcatctgtgcctttcttggctcccaaagcacagggttctatgtaggccactgagcatatggctctttgaggcaggtcacatttgcagctgaggaagattgcctgatgccgcgtggaactcttgctaggggaacatgccctcatttgtagaaagagcacatttccaaagtgttccatgcagtgatactccccgaagcttgtcttgggtctccaaatggacttttagtttttgttttgttttgttttatttttatttttattttttttgcttaaatacatatttatatatgtatttaaaatatgcatgagctacaatgcaaactcattctaatggggaggtggcattctctgccagctctgaaatctcagtcacactcaccttctgtgtttgtgttctaggtggacttagtagttttaagcagaaccatgaaaacctctgtgacaactccctccagctccaagagtgccgggaggtggggggcggcgcatccgcggcctcgagcttgctacctcagcccatccccaccacccctgacatcgagaacgctgagctcacccccatcttgcccttcctgttccttggcaatgagcaggatgctcaggacctggacaccatgcagcggctgaacatcggctacgtcatcaacgtcaccactcatcttcccctctaccactatgagaaaggcctgttcaactacaagcggctgccagccactgacagcaacaagcagaacctgcggcagtactttgaagaggcttttgagttcattggtaactatctcccatagggaattttcatccgctgccttccttttccctccagctcttgctttgatatcaagttcaaggtttattcctgtgttggaaaagaaaagctgccctggagttttggagggctctgccacctgaaacagcctaagcattctcctaagtcatagcctgtcgagtgtatccaagccatcaggatggatataaaaggacagtaattgaatttgttgggatctgttcaactagaaatcctcatccctcaagttctcagtgaaatagtggtaggggttagcatttatgtgctctgtaaccagaaaagtggatggaaagtaaggaatcggaggtcagagctggtgctactgctacttgatctactagcgccgttgagcaccttggaagcaatatctagtgaatatgacaccccttccaaacatacctatgccttccggtcaccctactaagccttattcatccagcataaggggagatggtactaggtttcctttgacagtctgccccaaactcattgaactaggaaagatcaggttgtgtagacggagtagttcccaaggaggaagttttagcaacagcacgctttgatccccagaaggaagcaactattagcctaatcctaatcttaatttctgcaacttctatagccccaaactgctataagactcaaaatatcgccgggcgcggtggctcatgcctgtaatcccagcacattgggaggccgaggcgggtggatcacctgaggtcaggagtttgagaccagcctgaccaacatggagaaactccatctctactaaaaaaatacaaaattagccaggcgtggtggtgcatgcctgtaatcccagctactcaggaggctgaggcaggagaatcgcttgagcctgggaagcggaggttgcagtgagctgagatcacgccactgcactccagcctgggcaacaacagtgaaactctgtctcaaaaaaaaaaaaaaacactcaaaatatcattttgggagcacctgcaatatagcaaaactcaacatttatttttttttacgtaacttcaacttttattaccataaaggggtggcctagtacttttcctaaatattacagcaggttgttattccaggaagaatacagttaagtggagtggggtgttcctttgtcagagaaagaaaaaaacagcctcaggtttaacagccagtggggtctggtggatttgctgtagtgttgacatctctggtcattttgccaagctgttttccttgctaattatgccgtcagcacaggaccatggaatattgagtctgaaaggaaattcagggtgatcactgaacttagagaagtaaagtgacttcttcaaggtcataggaattctagtgtccaagaaggggccagaatccagggtttttgactcccaagcctgaggccttttcacaacacactaaggcaatgtttatgatgccctattaagtaattcccaactggcaacactgaggatgcagagatactgcagattctttattaataaaatctgagccaaacctggagcgctgaggaagaaaaatttctcaacaagcatatgaggaacttctggttgatacatgatgtgatgttatgactgagattccatctgacttaactccagttggaggaagttaggaaattgttttctatttaatgagtagggtaagatatacttgttctaagaggatttcaactaaagctccttctcacattccttatagattattcaggcttacctgcctttttttttttttttttaaggaaaacaaaaccaataacaaatagcattcagcccgaagaacaactccatatcacaacctgcataggcacaattttattttcattgttatattattggataaactgaaatcttacagtcttgctttagtaaaaacacagcaggttttataaacataatagctttcactgagagtgtaatataagctgagcagcatctaagtttagtgtttataccagtttatttattcctgaatcaagtgtgtgtagtggaaccggtggtccagccaggcactcagaagctcattctctcaccaccatgctttctggtcttgacttggagctaaataccgtgtgctgaagggaaaaagttgaaaaagagagatgcttacttttcttgaaatactgttgactatgagaagtaaacttcatctgtaaatttttaagatgaaaatttacatcaggttttttttccttggtccactggtgggtagccagtagatgtagtttaggtgaaatcactactctctctaccccttctccttccctacctgtttatctaattggtgttccttcaaggaagctttcttagggatgtgttagagtctagaaatgtcattaagaatctgttcaggtagtgcccacatgctattgtcctgagcttttaatatatttgaaaacttagcaagtcttcctctttcaattgctctggattttgagccattgctgggattcctccatcttctgcattattgccacactggaatgtcatacatggaagcaaacgggattgaatgcttgagaggtgacaccctcggcctgtatactactagcctttagttaactttgcaacaactggattttctggggagaagctgaacatagtatcttcctagttaagctttattcctttaaccttaatcagggtttagtaagactaaaactcttatccatttaatgcccgttcctgtacagagcaattctatagaataaagaaagtgttttttctctattacaagtgagagagttgttactagcactaggtttgttaagtcacacaaccgaaaattggaattaacatccttaatccaaagaggaactgcatatatatatatatacacacacacacacacacatacacacacatacatatacatatatatgtgtgagtgtatattttcatgtgtgtgtataatttttccccttcctctctccttttccttcattctttttttttctttcagtagtgtaattccagaaaaaaagagaacaagacatttgagagaaggttcagtgactgttagagtcgacttgatcagtagcttgttcaacgtgaaagttaactgtgttataggtctggcttccggccactgctgtcacctgtgcagcaaactgttcctatgagcaattctttcatttaatcttctctttaaatgtagatgtatagcttcttgttcgtgctgatatcaactttagccagttctggaagttgtgacataagtatacgtaatgaactagtggattatacttggctttaaaactgttttaattcattatttctatacaaaataaggcattgcaaagttgagatgaaagtttctctctccgtgcctctctcttccatcttcccttcatctcttgtctttctcccttttttcagaggaagctcaccagtgtgggaaggggcttctcatccactgccaggctggggtgtcccgctccgccaccatcgtcatcgcttacttgatgaagcacactcggatgaccatgactgatgcttataaatttgtcaaaggcaaacgaccaattatctccccaaaccttaacttcatggggcagttgctagagttcgaggaagacctaaacaacggtgtgacaccgagaatccttacaccaaagctgatgggcgtggagacggttgtgtgacaatggtctggatggaaaggattgctgctctccattaggagacaatgaggaaggaggatggattctggttttttttctttctttttttttttgtagttgggagtaagtttgtgaatggaaacaaacttgtttaaacactttatttttaacaagtgtaagaagactataacttttgatgccattgagattcacctcccacaaactgacaaattaaggaggttaaagaagtaatttttttaagccaacaataaaaatataatacaacttgtttctcccccttttccttttaagctatttgtagagtttatgactaaatagtctgtgcaggttcatagaccgaagatactacacactttaaaccaattaaaaagaaccaaaagtaaatagaaaagacattgaatcaccaaggcctgggatcaacctgggctgtccacacagaaaacaaaaacccaaccaaaccaagccctgttgtgctcactggtgcaaagagaagatcagggcagcttaagtggtctaagaatccttcaggcattctttaaggagaaaaaggatacctttgattttgtgtgtttcatgctctggattttttttttttttccttctctgggtttaagagattttttttgaaatagtgaggaactgaccattatatgccttcactggcttcttgtgcaataatatgatgttttaagtgtgcaaacaagttagagctggcagctgaatgatagacaaatagtgcaaatttgccagcttggagatagaaaggaattcaacaatatatcaaatactttccttcccacctttttccttttttttttttttttctgatttgattctggttacagtgccataaaccttgttacatatgtatatcagaatgtaagaaaaaaaaatttatttaaaaatatttttcgcaaaaaaaaaaaaaatcttggtgtgtttctgttgattgtgtaaaaatttattttcattatataaatgaaactggtttaggatgtgtctttttttcccctctcttttaccttaactcaggttcaagcctttcttaagctctggtaacttgcatatacaacaaagttgaaataaaacagatttttatatagggaaagagagatgaggaagggaacatatccagttttctcactgtgaaacagagttagcaaggaagtggaagagctccagtattgatctgcccagtcactgtcccttatattctcacaatgctgtcatcctctcctgcaaatatcattccttttgcatcggggaaggcttgcattaaggggatcccatctgcctttgcgccttggtgaccaaatccctgccagattgattggtgagaattcagtgatctccctagtggctatttgataaatacttaggacaatcttccatttagggatcttgatgttcctccccccacccccccaccccattgtcacttgctcacttggcatctttggtgacattaaccatgtaatgcgttgcagcaaattgctattgcctactcttttccccagcaaactgaaactcagctccatacatgtgtacagcttccttataacactgggttaatgcatagctgggttcccaattcactgttgatggagggttgggggtatgggaaaaacacaatgcaaatattttctgtgtttcattaaattaaaagtctagtgggacttggccataaggaagatttatggcaaactgaaatttgcctggggtgaataaaagagttgaagaatctggcatgttggattctatgtgacaacatttgacataaataattttgtgtatgttggcttgaaaatgttaggaaatatttttgacatttaaaaaaatagcttttctaccaaaaataatttaaatttttcttttatagaaaagtggagactgaatttaacaggaattaacagctgttttagattattttaatagaaagtgttaatcaggtgaaaagcaaatctctgctttgtgctttctactcctcaggctaacaatttccttggtgttagagtatttaaggagtgaggttgatatataattagtgatttaaaatacatggtaatttagcagacatttctttttgttattttaagtctaagtgttaaatttctgatagcatgtaaggtatattgcctccctctgtcccttccttctttccttctgctttttctttgttcccctcccttccttttccttccctccctctttccttccctccctcttcccttccctctcccttcccttccctctcccttcccttccctctcccttcccttccctctcccttccattccctctcccttcccttccctttcccattttcccactttgcctcattccctctttgcctctttccctctttccctctttgcctctttccctctttccctctttctctctttgcctctttccctctttccctctctcttttttctttctttctaacaaaacagagaaaagtcaatacagtttctcatctttatccacatggaaatgatttatgtttttggaagtttatgattttgagagaaaagcctatcctggggcaaacagtaatcctgccaaccagaataccaaagattctgagagggactcaggtcttttctactaatctgctgtgagtcacttagcctccatttcttcataaggaatgttaaccacttcatgaaaataatacagattaaccaagccatagctctagaaaccagactccacatgttgctgggcctcactagctgtctgggagctataaggctgccctaggaaataattgtgtctccccaagaaagccaagtccctgaccaacgcatgaaccattctcagaatccagcaacggttgttttatattaaatgaatctaattacttagtagagtgaacctgtaactaatttaaagaaatacagcaagcattgttatcttaggttgaacaaaacagtagctttaggtttctatatatattacatttatttcaatagttaatacttttccaatcaatgcatgtgaaccatgatagggagttttcatttcttgaaagagtttgtgccagtgtcttctggataaggaaaggcatcatgggaggtagggcaaggaagctgacaaaaaacatgtacaaggggaaatattcaagaaaaaatgtacacaaccacacaatcacatgctggcagtaaaggggaaacatggcctttcgtaatacgggaaacaggagaaaatgggaggctaaaatgaaaagaaaaaaacctatgtcagagtaaggaactaggacctgaattacactccagaagctgactaagatagaatgctaataaattgctcaactagatattctgatggtaagaagtccaatgagccaagttaaatagagatcaatcaatgatggccttcacattatttggggacaggctcttgtaaataggtcacaacacattttattttatgcttttttccccaaacatgaaatatcaggaaatatagttgctgtttggtttcaagctctgattggagacagttgttgcatatgaatggaggtcagatgaagggtggtagaaaatgactattttagcactggcacccagaaggatgggtcataattcagaagtgccccaaatcacacctatctgtagaagacttcctgcctttttgaggtggtggaatatgaacaccagtgctttctgtggttcctgatttcttccttcgtgacaacctttgtcagtgtttgatacaaggtgcatgtatcggtgtttaataagaagcagaaacagtgacatagaatgaggggtttattccagggattagacctcaggcaagtgtgggatctggtgaagaagtcaatgggagtgtgttgcatctgtctgataatgggctgaactctccgggtcagcacagccaccagtaacaaaagctgggcatgaagtagagaagaacaaagaattggaattaggaggaaaaactggaacccacatcagccttttaccaacctcaatgggggtgacttccagaaggatctagtgccctctgccatggagctgaacatgtacctagcataggacttggcaaagctgaagacagagctttgggagcttcaactacagctgctgcgctaagtccaggtgagtcaccacatcagggtaaatgtgtgcttgccatcatagagtttggtgcccccttcaaatggttgctgcttcaattctgcttttccaacctcatgcaaatttcccctaaggctaaccttaactcagtgtgaatcaggagaggaaattctggaaaatatagctcctgatttagccaatttgatactgtagaaagctaccaaagtccatcccttgccaacttggcatccatgtccacttctcttaactaaatataacttccaaatgaagacattagcaaaacgatgcttctatgtagtatgatgcaactatcagttctacagatgaaaacacatttaaaagacgactgggtgcagtgactcacaccagtaatcccagcactttaggaggctgaggtgggtggatcacttgaggtcaggagttcgagaccagcctggccaacatggtgaaacctgtctctacgaaaaatacaaaaattagacaggcatagtggtgcatgcctgtaatcccagctactctaatcacttgaacccaagaggcagaggttgcagcgagccgagattgcaccactgcaccagcctgggtgatagagtgagatgatgccacagaaaaaaaaaaaaaaaagatacatagcctcataggttactttgtccattttgggatgatattcagtctttttttagctaagatccactttcccttcgatgtcatgtcatttgaatatactgagatataatgatattatgggttgaattgtgtctgtcaaaaagccatgttgaagtgctaaaccctgaaccttgtaaatatgatcttatttggaaatacggtctttgcagatataatcaagaagaggtcatattggattaagatgggctctaattcagtgactggtgtacttataagaggaggggaatttgaacacagacacaaagaatgtcacgtaacaatggaggcagagattggacaaaggaacatcaaagattaccagcaaccatcagaggctacaagagactcattgaacagattctccctcagagcttctaaaaaggaagtgaccccactatcacattgatttaggacttttcgcatacagactgcagtaaaataaatttctgttgttttaagccacccaatttgtggtactttgttatagcagccctagggaactaatacaaagactattattaccccattttatattagatggtggatggggtagaaaaaagaattggttaatatacaaccaaatatatttatatcaaaaaataaatattcataattcttaccatcctaatttctataactgatcttgtggtcatagctggtatttataacttccttctttcactacccattccatatacttgtgtcctcagcaagcacatcacctagtcatggtttcttgcctgttggggtgatgtcagttttcatttttgagggatccaagcttttgcaattgagcctgcattgggttattttccacttactttgttcgttacagcaacaaaagtaattacaagacttgagagtataagatatgatcttgaattccaggcacactttttcttactcctataatctggtagtaatccaatttccccagtcatcccagccaatacaccaatatctgactttgcttgttgattctttagcataaggagcccaaagtcggcagcagggagtatcaacttccatcttaatggaatcattgctgtatctcctagtagaagcatctctcccttggggaccagaacttctagaccagcagagtctaaagttgagaatagaaagaataaattttgctgtggatcactatgggtaacagtaagaggagccctttccatttttcccccttgattcctggatctatgaaatctggataagagagaaacagcaacatgcattgattgatcatttagagaatttactgcatctttcaggacattatcctagccctgcaaagtgtttccatccatctagcacagtaaatagttaaaagaagaattccacctttctactgctttagagtgatgaataacaagttaagactaatgaattccatgagcatgagtctgttattcttcatttgctgcaaagtaagttccttggtcaaaagcaaagcactgtggaataacatgaagggaaataagatataagaattctttaagtccacagatactgattttggcaaaggtattacaggtagggaagacaaatccctataaagagtaagtttctatggagcaagaacaaaatactgccctttcaggccttgtgagtagaagttcatgttgctgaattcatgcataccctccatgtctaccatcatggctattttgttcacgagctcattggtcaagaacagaagaaactggaaagaaaaacctgatagaggtctgcagaatgtgttctcttgtccattattaagattcttacatgctgaggttgagctttgatcaacattcacatgggcccatttaggaaagtctatccatttacttcttccctagattttcctgtcactaattttccagtcatgtttcttctaagtcccttattatccatctaaacgttagcaactgcccatgaagcaatgtagatttatacctctggctgtctttcctttgaggcaaaatgaacaattaggtacactgctggaagttcttattactgggaaaatttttcttccccacaccaccagtatagggccacaatgatttagtcattcggttttggatgataccagaatatcacacaaaaatttctgtaaacaatgccaaatatttttcagtccactggtcactgagtgcttcccatgaggccatgggtgtaagattctgaagctattgttgcacaaatagacaccatgggtaactgggtcacttgcttatttaatatacttgtgcttgatctcatatattctacttccatttgatcattgaatgaacaacttagaggcttccatttgatcattcatgcacaacttagaggcttgatggatcaacaacacttagttcatcatgggcagttcaggttgcattataacttgatggcccatgatcaagcttccagtttcaaactggtattctaaagaagaattttgaagagaaaagaagaatatctgaattaaaagaagaatttttctgaagaagttgttatagttttgctccagaattctaaatgtctgctctatgattcatctatcaggttaatggcttcatgcaagattcctgcctaacagagacatttttagcaccatggaatctactggatctagatgtaagagcagtttgtatggcagccttgtattgtagaggcttttcttgttttggacctcacacaaaactaatgaccttacatcttacttggtaaatggattgtagtagcatgcccaatgaaatatatattctcttcaaaatccacaaaggcccattagacattatccctctttcttaatagtaggagaggtcagatatagcaacctgtcatcatgttcatgaaaggaatatcttggaatgctcaaaacaagtagatcactacaaatttcagtaacattcagtggatataaagtgaattttgtggaatttatcactctctggtatgcaagtatcttaacatcatatctagaactagttactttatcctatttaccaggtacagtaatcatgatataatatcattaatataatgtgcctgcatggtatctgatggaatggatagacaattatggtccctgtggactagattacaacacagggctgtaaagttgaaatagccctgaagtaggacagtggaggtacattagtaaccctgttggctggaagcaaattgcttctgatagtatataccagaggttagcaaacattttctgtaaaaagctagaaaataaatattttagaatttggaggacatatggtctctgccataattactgaaatctgctgttgcagcataagagcagccatacctaatatgtaaatagagaaatgtaactgtgttctaataaaactttatttataaaaatccagtagtctgaatttggcccatgagctgtaatttgctaatttctggaatttattaacaggtatagagaaataagcatttgccagctcagtggctcctgaccaggtgccaggagccctattgatttgttccatcaatgaaactacagttggaacaacagctgcaattggagccaacatctgattgagatattaaaaattcactgtcattcttcaaaattcatctgtgttctgcataggataaatcagcaaaataaatggggaatttggtaggaatcaccatccttgcattttgtttcagttcctgttggtggctctaatcttcatactcctttaagaattcaatattccttttgtttactattttggcatgttgcttattgctgcataataaactactacacaacttagggacttaaaacaataacaattgttttgttcactaatctgttttaggcaggttcaatagggacagttcatctctgataaactcatgcagataagaaatgtcttctgggaaggcttgactggggctggagaacgtacttccaagatagcttgctcaaatgactggcaagtgcttcttatagttgacttggaactcatccagggttatccactggataccttggatcctctccacatggacctcttcatagggatgcttgggcttcctgaaaacatggcagctagtttccaagaacaaggattccaaaaggcatggatgaaagttgtaagtcttctaaatcacttaaattccaaagttctggatcacttccgccaaattctatttattaaatgaatcagtaatgcaagcccagatccaagggttgggtaattagacttcacttctcaatgcatagagtagcaaagaacttgtggccatctttaatccacgatagttcactttgcacaacaaagccaaaactaggagactgacaaaggttactacccccagaggagagtttttgtaagaaaataatatcgaatttcacagatctactaaaccactgggggctccactgagcagtatttcaaatggattacactctaccaagtcaggaagataagtaagagaggtagagaaaaaggcccaaagaaaagaacagaacacaagtatttattcattagtccttattccttatatatgtcaatttcaaggaagtcatcagaaagacatttcctttctcctaatctggacatgagtctctgggattctcttgaaagtcatcttcccaatgctaggcagcactgcaccttagcatttatccatttatttgttcattcaacaaacatgtgtttcattgatatctttcagtggcccaaaccatggcaagtgtttattaagaagactctacccttgaggggcccatagcctcccatgtatctatttagactataggttaaagacatacttggtcttccctataacacttacgtcagtgtcttggttgtggtattgctcagtattttattattgactcatcagagcatttttactccattggcttttgacatctaaaacagttgtcaacttataaaactccaaaatatttaacaatcagctctcataagctggtgtgtgggatggtatcaaaaagctctcctctacctcgtaaggttgtcactgcagacagtacttcaaggattttttttttttttatctttagctaatttaaagctgtcactccttattttggatgggagggagaaaatagctaattggaagcagaggaaaaaatagtttcaggatcaatggtggaaatagcagcaaaataattattattacagtcgtaatgctctgcatttatatggggtttttttccaaaggtctcagaacacttttctgaatatcacctacaaattcaaaaacaattatgaagaagtcagagtaaagcataattataccagaaatttactctgaaatgtaattcaatactctaatacaattttactctcaaatataattcagtgaaaagtagacttattgtaaactgaattatagacatacatttggatttttttttttttttttttttttttttaagacggagtctcgctctgttacccaggctggagtgcagtggcgcgatctcggctcactgcaagctccacctcccgggttcacgccattctcctgcgtcag

SEQ ID NO: 191 - DNA, 1909 bp, Homo sapiens
  misc_feature (1891)..(1891): "n" at position 1891 can be any base
ccacgcgtccgcaatgaagccgagtgaatgggggctgaatgtgcgagtccatagctgaagaggagcgccagatggtggaggaatacacttatttatgaaactgtcttgagttcttcttgaattgccagttttcagcctcctcatgcctccgtctcctttagacgacagggtagtagtggcactatctaggcccgtccgacctcaggatctcaacctttgtttagactctagttaccttggctctgccaacccaggcagtaacagccaccctcctgtcatcgccaccaccgttgtgtccctcaaggctgcgaatctgacgtatatgccctcatccagcggctctgcccgctcgctgaattgtggatgcagcagtgccagctgctgcactgtggcaacctacgacaaggacaatcaggcccaaacccaagccattgccgctggcaccaccaccactgccatcggaacctctaccacctgccctgctaaccagatggtcaacaataatgagaatacaggctctctaagtccatcaagtggggtgggcagccctgtgtcagggacccccaagcagctagccagcatcaaaataatctaccccaatgacttggcaaagaagatgaccaaatgcagcaagagtcacctgccgagtcagggccctgtcatcattgactgcaggcccttcatggagtacaacaagagtcacatccaaggagctgtccacattaactgtgccgataagatcagccggcggagactgcagcagggcaagatcactgtcctagacttgatttcctgtagggaaggcaaggactctttcaagaggatcttttccaaagaaattatagtttatgatgagaataccaatgaaccaagccgagtgatgccctcccagccacttcacatagtcctcgagtccctgaagagagaaggcaaagaacctctggtgttgaaaggtggacttagtagttttaagcagaaccatgaaaacctctgtgacaactccctccagctccaagagtgccgggaggtggggggcggcgcatccgcggcctcgagcttgctacctcagcccatccccaccacccctgacatcgagaacgctgagctcacccccatcttgcccttcctgttccttggcaatgagcaggatgctcaggacctggacaccatgcagcggctgaacatcggctacgtcatcaacgtcaccactcatcttcccctctaccactatgagaaaggcctgttcaactacaagcggctgccagccactgacagcaacaagcagaacctgcggcagtactttgaagaggcttttgagttcattgaggaagctcaccagtgtgggaaggggcttctcatccactgccaggctggggtgtcccgctccgccaccatcgtcatcgcttacttgatgaagcacactcggatgaccatgactgatgcttataaatttgtcaaaggcaaacgaccaattatctccccaaaccttaacttcatggggcagttgctagagttcgaggaagacctaaacaacggtgtgacaccgagaatccttacaccaaagctgatgggcgtggagacggttgtgtgacaatggtctggatggaaaggattgctgctctccattaggagacaatgaggaaggaggatggattctggttttttttctttcttttttttttgtagttgggagtaaagtttgtgaatggaaacaaacttggttaaacactttatttttaacaagtgtaagaagactatacttttgatgccattgagattcaccttccacaaactggccaaattaaggaggttaaagaagtaattttttttaagcccaaccattaaaaatttaatacaacttggtttctccccctttttcctttaaagctantttgtaaaagtttatgag

SEQ ID NO: 192 - DNA, 1449 bp, Homo sapiens
atgcctccgtctcctttagacgacagggtagtagtggcactatctaggcccgtccgacctcaggatctcaacctttgtttagactctagttaccttggctctgccaacccaggcagtaacagccaccctcctgtcatcgccaccaccgttgtgtccctcaaggctgcgaatctgacgtatatgccctcatccagcggctctgcccgctcgctgaattgtggatgcagcagtgccagctgctgcactgtggcaacctacgacaaggacaatcaggcccaaacccaagccattgccgctggcaccaccaccactgccatcggaacctctaccacctgccctgctaaccagatggtcaacaataatgagaatacaggctctctaagtccatcaagtggggtgggcagccctgtgtcagggacccccaagcagctagccagcatcaaaataatctaccccaatgacttggcaaagaagatgaccaaatgcagcaagagtcacctgccgagtcagggccctgtcatcattgactgcaggcccttcatggagtacaacaagagtcacatccaaggagctgtccacattaactgtgccgataagatcagccggcggagactgcagcagggcaagatcactgtcctagacttgatttcctgtagggaaggcaaggactctttcaagaggatcttttccaaagaaattatagtttatgatgagaataccaatgaaccaagccgagtgatgccctcccagccacttcacatagtcctcgagtccctgaagagagaaggcaaagaacctctggtgttgaaaggtggacttagtagttttaagcagaaccatgaaaacctctgtgacaactccctccagctccaagagtgccgggaggtggggggcggcgcatccgcggcctcgagcttgctacctcagcccatccccaccacccctgacatcgagaacgctgagctcacccccatcttgcccttcctgttccttggcaatgagcaggatgctcaggacctggacaccatgcagcggctgaacatcggctacgtcatcaacgtcaccactcatcttcccctctaccactatgagaaaggcctgttcaactacaagcggctgccagccactgacagcaacaagcagaacctgcggcagtactttgaagaggcttttgagttcattgaggaagctcaccagtgtgggaaggggcttctcatccactgccaggctggggtgtcccgctccgccaccatcgtcatcgcttacttgatgaagcacactcggatgaccatgactgatgcttataaatttgtcaaaggcaaacgaccaattatctccccaaaccttaacttcatggggcagttgctagagttcgaggaagacctaaacaacggtgtgacaccgagaatccttacaccaaagctgatgggcgtggagacggttgtgtga

SEQ ID NO: 193 - DNA, 72732 bp, Mus musculus
  misc_feature (3522)..(3541): "n" at positions 3522 to 3541 can be any base
  misc_feature (19836)..(19911): "n" at positions 19836 to 19911 can be any base
  misc_feature (43636)..(43770): "n" at positions 43636 to 43770 can be any base
  misc_feature (47357)..(47376): "n" at positions 47357 to 47376 can be any base
  misc_feature (57087)..(57120): "n" at positions 57087 to 57120 can be any base
  misc_feature (64787)..(64806): "n" at positions 64787 to 64806 can be any base
ctgtgtgtgtgcagcctgagattagaggggacaaactgaaaatggctgcagagcgtatgatccctgcagtcagtcaactggagttgtcattctggagctgaggaaccccaggcaagtcctgggtctctttaaggtttggtttccgtcttggtagcatgaggacccaacttacattttaaagggttatggttacaaaattgtcttgggaacatcaaacaatagttattctagctttactttttgacacagatcttgctaagtaacctagactgggtcctcaaactctggatctgtctagccttaagcatccccaagcgttaggctacaggtgtgagccaccaggcctggctatttaacctgtctagtttaaaagtgtgagttgggggagtcgggggtgggggagtacacacctttaatcccaacacttgggaatcagaagtcgaaggatctctgtgagtttaaggccagactgctctacaagttccaggacagccagggctacagagagagtctctgtcttgaaaaaccaaaccaaccaacccaccaaccaaccaaccaaccaaccaaccaaccagccaaccaaccaaccaaccaaccaaacaaacaaacaaacaaacaaacaaaaaatggtccttgtctgtttggtgcttggctttatggcaccggagatgaacatagggttttactaacctaggtgaggactgtgtttctgagctacaacagctgttgtcacctgatgtccattgtgttgtcctttccagagagtaattctacaatatagtggttagaggagtttatcccaacattgattccctttcactgtgtgaacctggaatagttattctctgtgcctcagtttctccatctggtccatcctggtaaaaaccacagtcaagggattttcaatcaccctttgagtatggattttctagcacacacacacacacacacacacacacacacacacacacacacacacacacacaaatgagtcccaaactcacagaggtccttcagcttctggtttccaagtgttggggttaaaggtgtgcatcaccactacctggctcacacttttaagttagaaaggttaaatagccatgtgtggtggctcacacctatagcctaggcttgaacgaactacagtggcccccatccactctatttaatggtttgctgttataatctggaggtcagttctggctggtggctggtggctgatgaccgtaggtcctctctgtgtgtgcatgtggtcctttccatgcagatttagtaacttctttggacttcctcataacatgatgctgatttgtaaggactaatatgaagtgggtggaggcattagtactttttatcatctagcctctgaggtcaagcaagagaacttctatgaccctgaatttgttgacgcaaccatgaaattccatcgggcttcaggggtataatggttaacttgcattgtaatttggatgatttatagtcaccatgggcgtgtgtctcggggtgagtctgtggagatatttctgaaaaggtctgactgatgaaaaatgctttaacttgaatatgaatagcaccatctcacgggccgggatccgactggagaaagcgacctggatgctagcatttgtctttcttggcaacgtgaccatgaatgcagtgtgaccagccacctcatttctactgccaccataccctgcccaggatgatggatgggatcaccttaaactacaaatcaacacaaacacttccctctttaatttgcctcctgccaggtattttggtaacagaaatgagaaaagttgctgagaaaagggaagagaaatagaatctggctcttaatggaggagataagactgtacatatggagatagccgttaaggggaactggaattaagtttagtaactggtgactgacaggtgtttcacatgatcctccttatcctactttccattaaattatcttctcattccttcttcgggaatcagaaggctcgccctagagcacagcggggtccctctccgaagttcatcgcgccctggagactcccactctaggctgatgtttctccctgtgcagaatggttcccaaagcaatgaaggcagcaagctctgctcccaagaaagctgtcagcattttgtatgccctcaggttgacaagagaaggaagttcatgtcgttatgaaaagaatgcagcaaaatgccaaagctccggtgttgcccacggtgaccctgaggagcggatatgccagagattagctttgcagagcactagtctgggagccgctctgtggtccccctgaacatgagaagtgacgggaaacttgacattccttttccccatcacctccagcaacattcatcagctactgaaattgtcctttcaaggtccagggcaggacaaaagcaaaagagggatgggtctttgggaaattactgcctctttgccccacatcttgtgcccttctctcagaaaagaaaacacagcttaatagggctgagaatgagcaggaaatccaggacttctcttctgtcttgtttcaatctcccagctcatagaaggatgtgtgaggaaaatttctttggaatattcctgaatagagtgtagagatagatcgccaggcactctggatgtctgtctttgcctctctggatgtttttccgtgtctgttttagctaagctgtttaagagatggacttggtggctcttccttcatcctatgacagtgtttattattcttcatctgacatggaaagcacctactaacctaactaaggacaacaaaaggtagaagatatatttgtgaatttaaaaggaataaatgggtatatgtatatatgtatgaacacacacacactcatatgtgacaaattcaaaataagtgaattttagctaatgaatcagatccctgcatggctttttctgtcacttgccaaatccgtattatgtaaacagagtatatgcaagcaggcactaccactactgtatccattactttggccatggatgcctcctacgttggttgtggagccactgaaagagccttgtctctgccacctagaagcccaaaatcaagctagaaaggggaagaagtcagggcctacggggaacagcatccatcacttgaaatgaagattggaaatgcggaatagtaaagcactctgcttagaagaccagcatattcttgtttcagaatctaacagttatcaccaactgctagatctctaacctttgaaaaatgatctcttattttatgtcagtttttttaaaagaataccagtcttatttccaatggctcctggccatgtaagactcactgagcatccggcaagtaggatttattgggtggagcgtacttcttccctgcttcagacaaagccaaggcaaagagtttgccaagggcttctggtcagcattgggagaggtaaggcatgaaaatggaaggcccaagccagtcagaaggaggggtggaaaggagggagataggaagatagggagggaggagggagaggaggagggagggnnnnnnnnnnnnnnnnnnnnagagacagagagaaagagagagagagaactattcataagggaaggtgctgtcagagaaacagcatcgaccatgggaaaagaggggaaaagataaaatagtagactttaagatgatgcagtagacttacagatgaccatgtcctttgctcaggagagtagcgattgggtgagaggaggacaagtcatcccaggagctacttgattccctcttgcaatgtttctctacaaggactataaatgatatcataagtattgtggggagtcctgaaaaatggccacccatggtcagagagctacatcagattcggatttagctgcttgcttcccaagcaggtctactgagctttcttcgaacacctgctacctaatccatgcatacagcagacactcatcgagcaaacgagtgtctaacacgctgggccctcgacagcactcagaggccaccctggtaatgaggcaaaggatgcctgctcccaggtacttccatcctaatcctacataatagtcaaaggagttctcattcacatgtctctttgtctccgtctccccccagcccccgactcattcattcggagacatgtgttcattacctactaggtgccagatgctattctaggcaaaggacttgcatggaatgatgccatgtcccctaagggtttaaatgtcatactcaggagattaacaagctcatgactccatgggcagtgatggttcatgattgggagtctggtttgacgtcactatgggaatgcaagatgactgcagctgtgtgtgtgtgtgggggggggggggctgttgtgatgcaggaatcctagaaaggaatcggcttgttctaactgaacatttcagagcgtgcttctccatgcagggacaccgtgcccagtactgagggattgtggttaaagtaaaatagaagggacactgaggatacatagggattctcctagaattgccaacagagtctctaaggcctgacgtattcctcattctcaggggaggaatctagccaggttctctggagctagctgcccatctgaattagggattccagaacagcaggactgttaggagccagaggttgatgactagattatagataggctctttaggagaattatctaacatgcttatggcggcttggaactttccaaatgcccatttgcagactgtaggaccaaggaagttagtactgtggctgagaaagatggtcgagtgctgctattgtaagcctgcggctactgccagcccagcagtcccaaggccacatcctgggccctgatgtctaagggcagcaagggaaggctgtcccagatatgacaatgatggtgatggtggtggtggtggtggtggtggtgatggggaagaggaggaggaacagcagaagcagcagcagccaatcaaagtggcctcttttcttgaacatttagggaaaaggcacagggaagaaagaagcattgctcaggttccatccggtccgtccctgtctcatcatctccaccccaaacattttcaggctatctcttggtactggctttaaaactaaagatgtaattatttactctgtcccaagaacactgaatagacaattaggcagtttacccagatgatgtcattttatcttcatttacgccccaccaggttagggcttgttggcatccccaagctacagatgagaaaacggagctcctacagtataaagtcattgcactgggaactaaaggaacagaggatgaagtttgggttggcacttagagcctccctggctccaaagattgtgcttgaagttctaaaacccacaaaaatcactttcaaagggccaattgtctaactggcaaaacaaaccttctcagtgagtggtagtgggtctgtgcccaagcagagggcatggatggaaaccccacatcatcttcattttctgtgtgcatgaacaagttacttcgcttctccgaatatctgttttcttgcctaaaaaaaaaagaggtgaaaacacctctcatatcacttggatggatgaattagatgtttcgtgtaaacataatttcactactagtaagtgctttgctaaattgtctactgtttctatttatttctataatttaagacccagtttatttgaagtgatatgggaacgttaccttatctgtactaggaaagcaagctagttttcatcggagcctatgtatcagtcattgatagtatacatctcctagctccagcagaggatggggggaagtgttgccctaggccttagcagtccactgctttgtctcagagctcagcccgctaactcaagcagtccctctgaaaggactctaaggaaaggggtcgccacagagtaccactgtgctagaatatttgacaacttggggtagggaacattgtaccaccttctaggtctgcagctcaggggtgaggcaccaaggcatcctgactaggggatgcaaaggtgcttctagtgaaccaactgttgagcttgttctgggctcccttgtagtgatccctactggggtgctaagaaatcttataggtgggcattgtacagaggtaaagaacctagttttaagcagcatggaaccaacaggtctttccaagaatagcctgtgttttctgaatgaaatcatcattgccccacgttcatgggaaatgcaaactcattagagaccaagaacagtggtgaaggtgaatcccccattggtgttccttttatatttggtctgccgtgccaaagacgggtacttctcaatatctcgccactagagctgctttgacagcagcataatgctcattcctataaagagtttgaagtacccgttaatagctttgagtttaagcattaggaattttaaggttcaagtatagagctttgaggagcacacattaagtagcaacatcagctcataaagctacaagagagaggcagtgctccctggcacactcactctcacctgtctgccgcagctgcaccttggtactggcttctgcatctcattgtccatggtcttctcagtccacagaagtgacacaaaggcctgccaccactgcccagcacccatcccctcctctgcactctcccactctcctgtttccatcctggatgtctgttatctccaaagcagttttgaaagggtcctcactctcgcccggaagcagcagggcacccagggcatggtctcaggcttgaatgacaaaaggggtcctatttcctggcaggtgtggcaagaatgtcctccccaactgtaattttcacatggggaaaattaaatcagcttctttggcacctcagcccccaaatatttttactgcattgctgttggcaacttatcctaactaggttgattttcagattcagtccaaaagccaaacaggaaacaaacctttttcttcggttctttctttccagcctcactcatctacagagtctgctttccacactactatgtgggcagaaagccctttgctatcaatgattgtaaatacaataaatcccccaactgtgtgtgtgcacataaaggatgcatgcatgctgtatggagtgtgtgtgtgtgtgtgtgtgtgtgtgtgtgtgtgtgtgtgtgtgtgtgtgtgtatgtgtgtgtgttttaaaagatccagaaattcaggacatttttcaggaaggttttcattgagttaaaaagcaccccagtgaaccagttagaactgtacagaggttgtagtggcaactcgcaaatggtttgacagatagggcaaggctgggtaattgaaaaccaagtgactgagtgtaggtttttccatggtagaaatacagcaagttcttgggggaagaattgacgggtacaagctgtattcacagcctttggaggaatgggatctgtctgagattaggcacaggagattggggaagggtaagagcagtgtgaggagagatctatcagtgtacgtgcacctggccgggtcaggggtcagaggtgtggggcatttggggatgaatcgggatactctcttcctgtgatgctgccacttgactaaatgacctttgattggctctttgttttaaataaagtgtttatcctaaaatgggttctaaggggatccatcccttctgctcttgtgccagccccatgctgtgctgctgtttcttctgcctgcaaatctcacttccttaacaagcctccaagtcttagctctcccatttgttccctggtgcaacctctttgctctgcgtgctgtgcatgctgcaccatctgtatgtcctccttgggctcagcattcctgccttttgctgcttttgacctcctggttggatggcagtgatgacaagggccttcccttcccccacagcatccccatgtccatctctgcctcccagatcgcctcaactctgccattgtatgattttgctggaactctcaagactgactcatgactaactagaggcatagtctgttctctgccgcagaaatctgcttagatgacatctctttcaacaacagatctggggcttgttctgcattttttttttttttgtcaaagagactctgatgaatctttggtgacacccatataatgtcaaagatttatgctcagccttctgaacagccataacttcacagttttcaacttggagttaaacactaagtgtctatgtaaaagtttaagtttgtttgagacacaaagccagagcagaaccttaaccgaaatgaagagtggatctaagaaccaaaatacaagtagaccagagccacagccttcccctgaccctgcccaggggcagcaggtgaagccagaagggctccagcagcctttaggtctgaatgaaggacgtccagacatagcgagggtatttgctttagagaaggcattccaggcagagatatgaattatgtagggagagtaggcaaacctcaagatttaaaagggtctcatcatctatcattctgttcttaagtaaaggcagggttgccatagcaacacaccacaggctgagtggcttaaacaacataaatttatttgctcacagttctgaaaactggaaacccaaggtcagagtgccagcagggctggcttcctctgaggctttctgctctggcttacagataatctgtctccctacatgccttacatggtcagtccttggcacacagccacccttagggtctttgtgtgtccaaatctcttattataatgagtcagttgagtttagagcccatcttcacattctaatttcaaattaatcatatccttaaaggtcttattgccaagtggaatcacattctaagttacaggtggttagggatttgatatatagatttcagaggaagcggaattcagcatagaacaagaacccaacagaacccttgtttgaacacaaatggtcatcactgctagtctttctggagttttgtgctgtgcctagtgttgctatagctatttcccattgattagtccatctttccttcacagtcgggttacatggaatagattatgtagatgatgaggcgattatagatggctgccatttcttctgaaacatggtcagcttgcttttgtgtactgcgtggccctggggaatactgtcctccagccttgaatccctgctgctaaatgtgatttggaatagtggggggggggggggatcttatctccatgctttgatcaacagacagtctctggaaggagtaagactatgtttctcaacccattaccaaaagcctcccctgagtcaggagatggtacagtatgaattggtaaaccatggtctcttacagagaccttacactaactgccttttctatatatcagagcttcctcctgaattatttggctgaatcatcaacactaagatctgcaggacatactcattcccgctagccagtcctcagcacaccactgttcactcttaccaaacacttgaactacagttgctaatttaattcacctagtaagccagaagggaaaaaaaaaacaaacaaaactattcatcctcactgactgggtatactgaaatcgacctagctgaagttctggattccctgattcccttacatagcttaggtctagacaagctctccggtggctctccatgacctcacctgtgggataaattctcattttcatctctcctagcaatgtggctatggcacacagttagtaaaatgtgctgctgtctgtgtctggaagctagaaccaacactggtatcacctcttgcaactctgtgtttagccaccctgtctccattctcctttgtggggcttctagctcgaacactcaacaagtacacctgttctagtgttcttccattccaatgttcagactcctttctccccacgcaggggtaagcctgtgctgacactgtgaatctattaccttgaacagttacagcttcatgagaggactgccctgtgccactgtgatatctgagagttggggtgtcgctggctcgggtgacaattgatactgaatgtcctatctcttctcccctcttgcaggaggctctgtctgtggtgagtgacgatcagtccctttttgattcagcatacggagcggcagcccatctccccaaggcagatatgactgcttcggggagtcctgactacgggcagccccacaaaatcaaccccctgccaccgcagcaggagtggatcaaccagccagtgagagtcaatgtcaagcgggagtatgaccacatgaatggatccaggtgagcctgccagagttggccagtcctcatgaagcagggaagcctgggcgcaattcctcctaggaccaccctgtcaagccgatctgcacaaagcagcagatgggtcaggccccaaggccctactgcagtactcagtgcgtttgctgtcaagcttaggccaggtccagtcctgcaaggaaaacgcatagcagtaagatgctcttcctgtgctcttgaggatgttttaaggtcctctgggtggcactaaccagagcaaaggtgacccaaaaattcttcaagtaaaagtggaaaagtggtgagaaagacagactgtgtgccaggaagccagcctcacacatgggaagtgtgggggtggagtggggcggggtcattaggaaaggccaggtacagccttgtttatggaactgggaaggggaactcagggataaagagcacacgaaccaacccattgtcaggcagccccagcgacaggcactacctcaacattttggctaaattatctaaacccatctgaataccagctttctcttgtctaagccagagtcagaacaccaaacatgtttatcaagtgtgttgtagggaaaggacccaggacattgtctagttccaaagtgctcaatgagttagtgaccacagacacacaagagggaaaactttagcctagtttattacctgataattcccagtggattcccaggtaatccacttagcctgaagcaaacagacatgaaagtaaaagcaagtgagtaaatacaagacaagaccttggttgataagctaggaatccagtttattccaccaacagaggctgaccctcaggactgccaggacactaagcatcatcggacccatgagacaaagctgatgaggtgacaatcattgtcctgcagggattgtggacaggagtgcaaaaagataagaagttactgaaatagcccagataaggaatcgaagttctgggctagggtgacagtaatgatgacagaagcccaggggaggtgcataaagagcatatcaaagggatggctacaagagctcggacttaataaacattgagaggtggggactggatgctgctgagtctggacctttgaaaggggatgcagttagtggcgacaggcaggtgggaaggggtgatgccttgaggaggggacgtcctttagcaccctttgtgagcaagtggtacagtctctagattaaaatgtctactggatttaggaagccaaagcccgtaggattgggactggaattgaggcttaggcatcctctctgggaggcttaactgaaagtgagtcatgagggaaactagtccagagaggcaagaggaagcagggagggggctactgtggctgctgtaagggagttcctccttgcagctgtctcagagctgccctctagaaccctcagccctgccacgcttccatcccatgaactaaaaccaggaagtgggaccttggccatccctgcagggttctagggttaggggagctcagagaacctgagccttgagccctccatgcagaatgatgcttataccatgattccggtcagtccattctcagcagagtgtagtttatcaaacacttgtatctagtcttgtatcactgctccctactaatctagaaggccaatattctcatcctgttaccgtatagaaaggaagtcgagagaggctaagctggcgccagcccagcctttccgattgcttgggcatcttgctgcctctccctctctgcctgtgcgtcatggttctgtaccacgatcccattctgccagcaccctctggtgatgaggccagttcagaaaggactcccaagctgcctgcaccatcacaaggtgttcctgatccctactgaaaaatctagatgctaatattggagagtctatagtcttgatgtaccctgtatctagttatcattgcctgccaagcccacagtgtctctcccagctgccacagagacatctgtgctccactcttccccttccctgcctgagacctattctctcaacaggcaacagtgaaagtcatccatcctttcacaacagtaaccttcttgctcaaaaacctttagcatctcatgtcagaatctaaagtcttagctaagtcccagattctccctggctcctgccttcctctatgccatcacacaagactctagctgctcctggaaaccatagcacaccactaccttggtttatcttccccaagtcccttctttctaaaacatttcttctccatttattcatacaactctctcgggtttttgcccatataccacctcttcagaatccctgacactccccgaatctgaaagagcaccctatcgctcgctctccctggtgggttattcaagttgtcttctccctcactagaatatgggcagggcttttgctcactgggcagggttcatgtgtttcttcaggaaaaagctaaatgggggcacagcagagcaggccaaagtcaagttgcttcttcaaggacatgccatgtaggtatgagttgagtctcccttacctgaaacatttgacatgtgtttcaggctctttcagattttagcatgtttgtttgcacacagtgtaacagatatctcagtatgataatggctgttttgtatgcacgtgtgctcagtgcccaacagtaagactatagcctggtgcatttgcattgggactgtgggctctcttgtgcatcaggtatggaattttccttctgtggcctcatgctagtacccaaaccatatttcagatggagaatccgaggaacagatgtccatatgggtgatccccaaggtcacaatgcccaggcaggacagcccaagctctgctgagttcaccctgtacttttgaagcatgggttcccttctaacatatctgtatcactgagctacctgttcccatccctgccacctgggtactgctgggccctccaggatgctgtttaagagctaagagaatccttcaaggaaaaagactctggatccatttccaggtcatgcctagcattagtcacccagacactagctggaagaagcccgtgtaagtattcccataagctggctgaatatttacctggctttgggtgtacagtctcacctactgtgctgaagtaaagatctagtggagtctagagccacccaggtaggcatagccatggttttcacctaatcaataccctcaaagcacgcacaataaagagccaggatcaaagactttcagaaagatgcttttatttgggatgaaaccatacctagcattaacttagcattatttaactatgtgagagaaataacatgtaaaaacaccaggcatggtggcatgctctggtgatcccagctgctgaggaggcacacagctggatctcctaggctcactggacagacagcctgctaggcaagctgcagatcttatgccacaaaaaggtaaatggtttctgagaaacaaaactcaaagttgtcctttggtctccagaggtatgtacaccagcatagaactgcatgcatatatttatacacaaaatacagagacaggcatagagacagacaggcagacagacagacagacagacagatttagagagacagagaaaaaaacaggggcagagacagagaagcgggtaaagagacaaagaggcagaagcagagggctaaagaggcagagagagagagagagaagacaaatgaaatgaatacatagatgtcagtctgtttaaattactcatcctgaacagtgcaactttcttattttctgagtaacacgggactttgttagttttgttagttgcatgattttaagatacatatatacaatgtattgggattcatagatatatgcagtgtattgtgattctattcgcccattactctcccttgctttcactccaagacccttcttttaccagctcatcccccaggcaggaaacaacactcccctctgcagcaactaacagttaatatctccttcagatggggcagtgtctcatgagcacttcctctatcagtgaaggaagttgacgggttcagtcttccaccagtatccattgcttctgtgtctctgtggttggaatggccatgttttatctgtgggtcagcattttatgacacccctccccactcccagctcttacatcacttcatctcttcttctgcagggttctataggcttagggtgtatataatatagatttcccagttagggctgagagcttatcggtcacttagcctcagcatctgatgaggtatgagtctcgacactatctgtcactctctgaaagaagctttcatgttctagactgaaagggatactagcctatggatataaatataaatattctggagacttagcagcatgtccatttagggaaacaacagcattatgttctcattgggtccaagactccaccagccacaggctttttaccaggtttatggtaccagatgtgtatctcctctcatgcagtaggcttccaatcacagagtggctggctacccaccatatggtcaagccaccgttgtaccagtggatttataatgcctgtcaagttgtattgtgcagcaagcatgagcactggtacacttcctcctctaggagcctgcatagagcctctggcaccacaaatgccagccagcagggagaggattcccaactcaatcccaactatttctttgtgtcttgtgaccaaaatgtgtgtcatcttcatcaatagggtcataccttctatatctggtgggtatcaagagttgcatagcatttgataattttcagaaagtccagttatcataacacaaaatgtagaggagggccaatggagacggttcagcagaaggtgcctgacagacaccatgcctgacaccatgcctgacgacctcagttctacccccacagagcctacatgaaagaatgaaagaaccaacttcttctagttgtcacctgatttcaatgcccatgccatggcatgtacccacgcatgtagtttgctcaagcacagatgcacacaatactatttaaaatgtagaggagggtgtgtcaatgctccaaagaagaaaacagagcagggcagacaacttggaagttcttggcttatggaccaggtctgtggcacccagcactctgatgcagtggccactaactagccccatgttgctgagcactgggactggagctactctatgagttagatgtgctataatgtaatatgcacattggacctaaaagtcttagtatgataaaatgtaagatatcttggtgactgttgattctgctgaaataataatcttgtggctgtattaaaatattaatgcatttatcatattatcatatataatatttaatatatttaatatgtatttcttatcaaaatatatttaatataataatcaataacataatatattgatatgttatgttaatgaatttattcaaattcatttcatcttcttagatttatttatttacttatttatttattgtgcgccggaggagttcggtgtgcaaatgtgtatgcgcttcacgtgcatgcctgatgcctatagaggccagaaaaaggcatcagatagatcccctggaatggaagttatgcatggttgagagtcaccatatggccctctgcaagaacaagaagtgcttttaactgctgggtaataatatctctggcttctcactttttcaattttaaaaatacacctactagtaaggtgaaagtgacccttgtgtctcaaatatgtaactcacaatctacttggagtggaccgtgatgtagcagaacatttccgattgctcagtgattcacagcacatccctacaaagttctttcagaagcatgggtctctgggttccttcttcacgcttatttacactccatagatgtccgtgtctctggcaggaaggaagtactccttgtctctgaagctgcaatacgctcttcccttttaccctagcagcaagccctctagaccagggtcaaagggtcattcagaggggctgagatctgaggcaagagagattgtctgggttgcctgggtcgtaggaggtttactctgtctcccttccactcctgttgtggttgaatctggtgctctgggttgccctccaaacagcacagcccataggttctgtgttggatataaacttcagaaacttgatccaagctgtggtttgcaaataactctcagctgcatcctgtctcgaccatgggaattggagaaaacagtgcatgagggaaacactaacagtttgtgagggagaaaacagaactagttttaatacctggcattcaggagctaaactcagcatcactgccctgagacaggctggactggccagcgttatcaggaggcatcgaacatgcagagaaccctgttccactctcaggaagatgagcctcccaggtaccttcctaaatttctaattctaaaccttgcatggggagtaagacacatatcatctgtgttgaaagcccaggtagtggggtttttgtatgggttttgttttgttttatttcttgaaattatacttctatatcaaaagcaacatgccacttctacacatggaagtttctcacagaaaccctaaaggcggcctagattcctcaggtgtgcagtgtgcatgctacatgaatgacacacagacagattctgtgaccgtgatgctcagtggtcccttgctggctgcgtgggcatcgggtggtccttggctctcaacagacctgtgatctctccaggcactgtgatcaaaacgggaaggtaactttgggagaagtttgagatcccagttaacccctctcagggtttcacatctccctttatattgccttggagtctgaagacacttctatggacccctagcagtcttaaagcagtgctcaataaacacacagaatagatgcttatgtctaagacggttacgctgtactgctgaggcctgctgcctgtagcctcccgggggcctgaggtggagatgctctgagttatacccatcacttcctcctgctctattgtggcagccttaggccctcctgtcacctgccccagtacagtcagctgtctgtgggcccaaacctcttgctctctgtaagtgcgggtctcaatacaaattagctgcagccgtatgggcaaaatgaatggccaaacctcttaccccgccagggctcccgcctcccctccctcttgttctccttaagccctcttcacaggcaccagctgcctcattaaagagcagcttttatgctgggcttcacctgggtaggcagtggtcaccaagcccatggctgggctggctcgctgaggcaaaggatagagacaaacctggcaggcaagtgtgcaagccagtgagacatggctttctcctttatcaccctgagctagactaggagggtgagctctgtaagggtaaaggataagggtatcaggtccttgtcctaaggaagtccctttgaagaccttgatggaaactgtttgggaccaagaaaggggcctcattccaaagaaggccaggagggacgctcaggcaggtaatcaaccaccaggggtcatacagctgaaggatagatggaggaggctaggacttctgtgggctagtgatgctacttactggtcagccaggcactgccagcgatggagcccagggggccccagctcctctgcacctgcttcttggccatgcctagggcacccttgttgccattcatccccaccaagcacgcttggttttatgtctcatcttttctttgttatcaattttttttttttactccagggagtggaagcaacctttccacccatggccaccgtacacagctccaagtcagggagatccactagtttgggtgcttctgaggttctaatctctgcctggaaagaggccaattttaaatgcagaaattccaaggccagacacctatgaaaaagaacatttaaaaaacccttctctccagtatccgtaaatgggagactttgaagtaggcacctcctcttttgctaccattgatcctggctggctggctctgggcaccctgcatggaaagtgtgtgtgctgtccactctccccacccccaccagccaatgaaaattccagtatcttggtttcaggccaacttaattctccaagcttctctggtatttggatggtttctcatctgacaagaatctggggaagacaaccagtgtgtgtgtgtgagtgtgtgtgtgtgtgagtgtgtgtgtgtgtgagtgtgtgtgtgagtgtgtgtgtgtgagtgtgtgggggttttacacacactagcatataggtgcacatctgtgctggagggtgtgtatttctctaactatatgtgtgtgatagcctatggatgtgtgcatgcatccctgcatacattatatgcatacattatatacatgtaagtggtagagtatatatgcatgtgtgttttatgggatgattgtatgtatgtacatattgtatgtagaactatgtgaatgtgtgtgtggaacatgtgaacatatttgtattgtgtgtgtagacctatgtatataagtgtgtgtgtgtgtgtgtgcgcatgtactgtgtgaagtagtgtgtgtgtgtgtttgtgtgtgcatgcacacatgtgcatatctgtgaatatgtcttttgatggccgagtacatacatatatgtgtacatgttatcactgtgtatatgatgcctgtggtaaagtgtgtagagcatagtgaattgtgtgtgtgtgtatgtgcatatgtactaaagttagaagctgaatgttttcattatgtatgtgtgctgtgtgtagtgaaatgtgtgcgtgtgaatgtgtatgcgtgcgcacacagtttcctgggggacagcagtatgctctggccagctcagcttagacacaggcaccagggtctgactggggctgcttcatctccagccaagtccttcaacagcagaagccaaagggctgagcgctggtgaaaagccccgatgtgctactgcctctcctccgactgccatggggacattaaaccttcaacaatctgggactctgacggctgggtcttggttctttgcctggaaaaacagtaggcaaatagtaaaaccttaaattctaacatgtgtaagttatacatcttattttcattttcagcccatgttctcctcggtaagacatcaggaaaaaattaccgtctgacttctaatatctcagtggagcatttatctcccagccatgataagtgatctgcaatatttttttcctttcagattaagaaacaaattcatttaattttctttattgaatgtgttcaggccctccctgctctgcctgactctcaggagccctgtactcttctccttcttcctgggctggtgactgtctccttgctgtgggatgggtgactccctagtaggcaaggcctgttccttaagggctctcaatctgtccctgcccactgcagaatgacggagagcagactgaccgagggcagcagccaggcgaggcacgtagggagatgttagcgtgcagagctggcagactgtaatcaaaacctcgtctcatccccttggcctgaaggccggtttggcactatcaggagaactggccacttcccaggctgttaggatgatgcttgctgtctggcactaccatagtgcagtatccannnnnnnnnnnnnnnnnnnnnnnnnnnnnnnnnnnnnnnnnnnnnnnnnnnnnnnnnnnnnnnnnnnnnnnnnnnntgctcagtgccagatgctgtgaatatccactgctaactgtgcttagtcttagtccaggatgggtaatgtgccttcttcctcttgcacgtccatattgcttcctatgtgcacttccatatgtgcacttcctcttgcacttccatagtgcttcctatgtgtgtttactactcagagctgtaaaaatgctacaagagtcatacataacaggtcacaatgcattccaggggttactcttctttgcagcacccagctcctctgtatgtggcctttagttgagaagtttaacactgggaccttgggtcctgcatccatctttactagccatgtgaaaccagtaagcacacctttcctttggtaaccacaaaagggacgtagtaacctttgctccacacatctgaaagggttatcaggaaactcagataaagcaaacagcttatgaagatgtattaaaatggtacacatgcagtagaaatagctgggctagcaagtactgataccatctcaagaaacagaagagacagggtaataggctgcacagagcatctcatgctggactcactcagtcctgtaaccaaggtagacatcagcgtctataggtttgtggagaaggcctatctattacaaggactagtgaaggtgggtaagtgttgaccactggcaatcaggttgaaactggacacagcagacagtggaggagggctgcaggcccctgaaacaggaacacctaggacacacagggtatttatgacaggatcaggataggttccacgaggaaggtggcactaagagttcattgtcattgttgtcatcatcccagggatgtctaagtgactggccaattctgttgaggctggagtgacatgtccccataatgatggcttcttttgacctgtttcctctcactccagggagtctccggtggactgcagtgtcagcaaatgtaacaagctggtgggcggaggcgaagccaaccccatgaactataatagctacatggatgagaagaacggcccccctcctcccaacatgaccaccaacgaacggagagtcattgtgcctgcaggtaccttgggagtcagctgcctggccaacgcccacacttccattattcaggggctgtaatggaaggttggcccatctcttagaacatgaaaacccagcaccctagtctttagtggcagactcaaaccagggaaagttgcacatcatacgtagctaccctccaaggcaggatttcaaatgtcacccgagccctggcatgctgattccagaagccccactgtcaaacataacacaaggcagattttcagtgagcagcctggtacccccaggatgaatcttgggcagaggcaaggctgctcaccccgccattccttcttgtgagaagtgcagctcccgatgtccacccttccctcaggcatgtacttcctgccttctgctagattccaccttcccaaaattacagccaactctttcagttttaaaatagaaataactatatttaacaaacagaacgcctccacgtgtgtgccacaagttatgtcattatgtagaaatagccttttttcctaggtattggtgctgttggttacggagtggggggccggggggatctattgttaaatcctctagcctattggctggatgctgcctgggccaggcccagtatgctcagctgcctaggtatggagggaattcaaaaactgccactttagagtgggtgccaggtggaaggggcagaatgtcaggagtttgaataaagtgaattacagggcgggagctaaaactaaccttaaccaaaataacttcaccagagaggctggatccttccatttgtaaatgtgtaaatgcagttgtgtcttagaacgatagtttgtcttgttgatctgaaggatgatttttgtgatgagcaagtctgtcctgtccctagtgtttgtttccatgggaagttgtatctgctatcctagtgtgacagtcacatttctgagctctgggctaaattccacatgggaaagagtgcagaaggtatcagaaatgaaggcagaagaggaagggctcttgcagctcacaggactaaaatctgcctgggctcaatcttcttcaagcataaggggctgatcgcaaggaaggcgtcacctggtttatttgtttgtttgcttgtttgggctgtttgagaaggggcttcactgtgtagcacatgccgtcctagaattcactgtgtaagccaggcagcaccttgcggcaatcctcctgcttctgccccctgagtttgggaactaactataggtgtgcaccacccactcctggccagaaggtctttattcagccagatttcacaggagccaagtgctttctcttctgtcacatcatctaattggtttgtcaccaccctcaggagagcagctggtggtggttagctcaggtgcgtcttctctattttgaggccgtgattctttttaagcagacgtggtgagagactctctccaccccactaggccaggagaggcctttgctatccaaatcgcctgctctagcctaagaaggaactcttaggggatgaaccattagaggaatggagattacctcaggaccaggtgattgtcaccaccttgctttggtcgtcataaggcagactgttcggttgtctctctacccttcaggtagttaaaatgttcttacggggattggcaaaaggtggctcttccatgaaccgacttaatcatagcagtaaaaaacaaaactggcatgtttatatcatgctgtttcaaagcatttggcataaggaagtcatgagctttagatccgcttggttattctcctactggttagatctgtatgcattactcctagacgctctggcttcctccaggtcagcctcctggacgcacgggaaagtctcacttgggcaagtccacaaatcaaggcaataaaacattagtggaacaaccgattgaatttatgacgggattttaagacaagtataaatgagggttctagttaatcaccatttccacatcgagatgggaaggaacaagggctaaatcgtccaggaaatacatttggaagagtttagcatgatccagagtggaagatttataattccttttactggagagggagagaattaacattgtgacagagcccaaagcgaagagcggaaataataaaataaataaaatatagggcataaaattgaatgtacagtctaagactctagtaagttcctacaagtaaggaactaggggaagctatggatgaaatgatacaccacataatccaagcccctgtgggacatctccttttgaattctcagatttccattcatctataacccttgcttgatggtttctgaaaagtagagggttggaaacagaaccaggagtttatctgatagacacaaaccccaacatgagcaagagggctagctcggggagatcttccgggtcctggaacaaggccttgcagttccaaatgagttaaggcgggatcctgacaagacaaagctggggcgggggggtgttcaaggggcctgcttctccaactatgtgacatctttgaaggcttctgtaaaaaccctagcagtagtcacgaaggcagaacttccacggttccttagccatctacaaaatgggtataacaagacccatttcatagattctcatgagagaaaaaaatgggtcagatagagagctggcttgtggtaggatctcacagatggactattactcagtaggtacatcttggagtcttagtatgacatacagaagctgtgacatatgacagatttttttctgtgctccctctcaacctctcaagggtttcttttataacccctagagatcacagcacctcactccctccccaccaccattgctggccatttagaactgagttctcttagcctagatcttttgcagcctctagaatgagaggaatatgagttggtttaagaggagtacacgtttttcctgctaaataagcatgctaaatgaaacaatcaagcagaaaagcagaagcaggagcaaccagacaccctgtaatataaaataccatcccttctccaggaagccttccaggactctccaaattcaccctagacccttcaacccaaggttcattgaactaccagcacaacccattgcttaggtattgctctgatggctgcatatttatgcagatgggtgtgtgtgtgtgtgtgtgtgtgtgtgtgtgtgtgtgtgtgtgagggagagagagagagagagagagagagagagagagagagagagagagagagagagagagagtctcaaatactcaaccctcctgcctccgcttcccgagtcctgggattgcttgaatgtatcagcatgcctatggaagtctgtcatttatagcatctcccaccttagactgagcaggttgagaagatgcttcagggaatgatgaaacagagggggctgggagaaggcaggtttggagcagaggcctcagtcctgtcctgtttccgctcattcacagttaaagaggtttctgtctctagagccatttctcatctttaagtatttaaatatcctaaaaatgtttaggggtggtctggtagaaatcttaacacagctgtccccccccccaaaaggaggaaacccagattggatttatgtcaaacagtaacgccattgggttttccagctgccaggacagaatcacaggaaaagcaggcttgtgtatatttcccttccggagagtccggagggataagtgtgccctcctgaattcactgctagtcttaagatgcaaatgggtccccttcccagaaacgttagttactggggattattttcattttgatgtcaccatttcttgggccaagctatcacttgacctccagaaactttaaacaccatcctgtcagggtatgtgttgaggcagctaagaacctttctcagccctaagtggttcaggcagtgtcagaagccatggaaccagacggagagttctgaggggacgatctggaagggaagagagaggaggtagaaagaaaagagaagagggaagagaggggcataggaaggaaagatgggtgggggtgggggggttaaagataccatgaatcaggagtgagagaaaaagaagaggaaaaaggagaagacggaagaaagaggagagagcaaaaaaagaggagaagaaaagagggggctgtggggaaagaggacagaggtggaagaagcaaagaggagaagatagagaagagagggtggaggggagcctaggctgctgggcaggcatgcatgctgaccgttgttatctctccactgcagaccccacactgtggacacaggagcacgttcgacagtggctggagtgggctataaaggaatacggattgatggagattgacacttccttcttccagaacatggatggcaaggaattgtgtaaaatgaacaaggaggacttcctccgagccacctccgcctacaacacagaagtgctgttgtcgcacctcagttacctcagggaaagtaagtaccatgtacaccccagggcttgggagcaggtcctgccaggtccccaagagccagcccaagggaaggataccctaataccagtcatggaagacctatgccaaggaacagtttccttaggacaggaaccccatcaaggtcacatgtgttcctacaaagcctgcaagggaaagatttcatccaggagtggagtgtccaaaggaaacagataaaaaatggaaaactcacagagacctgggacatagggaggatgacaccagctactaggtaggctctgggaagatctctctcttcagaagcttctgctaaccaaaattgtacagagatagaatctctggttggaggctttctaaggaaatgttaagagttcttaccggaagttctgaacatagatatgagatctaagattgtgggagctgacagactactcctcctattctggattcacattgatgcccaaccctaacctatggggctgcttctgcccactgccacgaaacaacaagagcatctagtggcccaggtctgttaggaggcactgaaaactttcccagacagaaacccagggaaagcttagtaaagaaagatctacccaataggaggctccctagtaccacgccccgcccaccagttccatgtgaattttgatagatatgaaagggaatacctatggacctgctagtgactcagccttaactctccatcagaaatccagactatccccaagcctggaagtgagctcagtggtctgcaaagatgaactgaagccacaggaaggcaggcatgggctcattctgcatgagagcatccctacagccagccacgtcaatgattagcggggcagaacaagatgcactgtcctctatgaacggcctagtttgccagaggtatcgtaagagtttgagaagatttgattgttttaaggcacctttgaattctcagacctcggccaacactgtggggctgccttttgtgggttcacgggctctggaatggttcactttgtataggatctccattgtgctttcagttgttatcagtaaaatacatcgtctcagtgcaagggagttctgtagagagcagggcaacactctactcacatgggctagaaaatgaaaagttaaaatatttaaaaatgcatttggaagtttccatgggtgcctctgggctggctatcttgccacctctctaaggcatctggtcgtgctgggagaggacacattagctccactgcaatgacctcatgtctgagttgctgcaccatgaggtcagtccaagaaataacactctaagaaggggccattttctacttagtctctcctgactttcagatgcttagcatttaataatgatttgtatttctcagcctttaattgcttggtggaaggaaagaacaaaaggatcttttaacggagttctgccatgatctgcacaagcaggagaggcagtaggcacagagcatgagtgtagaaagcagaggccaggagcatagcgccatcaagcctgacttctaggctcctcccgcatcatctatgcaagaggttgagtgatccctaaggaaggagaaatgtcagaagctccagtgagctctacacaaagggtccaataatcttggctttcacagtaaatgctttgtgaggaccatgtccaagaacgtttggacttcataaaagagaagcccattaagaccatgtgactttcaggcctggatttctgaccaacccgtaaacagcgcaagtttctatttcttccttctgtcaccaaagaatctgagccacagatactgacatgaggcatatatctgctgctcagaaggtctaggaatactgttaatcagtcactgcttcctatcaagccttggcaagcctgctagtagacaagggcagataacaaggcatgatgaaggtatgagcagctatagagggagcagggaatagagtttggtgtttggaggctagtgagaaaaaccatgtagtctctccttttaagaacacatgtaatcactatgaaaaatgtcatacaacacacgaagtttccagaagggggatttgctatgaaggaatttccagagttgagaagaggtagtacatgtgtatgtttggaaagcctttgaaagggcagtaagcatgtggtgataacagttgggagttctacacagggagagttttcctgccaccaaaatggaggtaaaacataagtgttgcatgtacttttatgctctaccagcctttgctccaggaagtgaccatgctaccagccccctcccagcttcccatgaatctgcagataagagacacagacactgggctggagagatggctcaatgattaagagcaactactgctcttccagaggtcctgagttcaattcccaggaaccacatggtggctcacaaccatctgtaatgggatctgagtccctcttctgatgtgtctgaagacagcaacagtgtactcatatgcatggacggaaggaaggaaggaaggaaggaaggaaggaaaggaaaggaaaggaaaggaaaggaaaggaaaggaaaggaaaggaaaggaaaggaaaggaaaggaaaggaaaggaaaggaaaggaaaggaaaggaaaggaaaggaaaggaaaggaaaggaaaggaaaggaaaggaaaggaaaggaaaggaaaggaaaggaaaggaaaggaagaaagaaagaaagaaagaaagaaagaaagaaagaaagaaagaaagaaagaagtaagtcttaaaaaacaaaagacacagacacacagttgttcaatttcaacttgccttcttgacataattgctggggattactatctcctgcctggaaaatgcacacttctctatactcttagctctgtacctcccacctgccctgaacttcagtggctagttccatctagcccctgccaaacatccctgaccaaccacctgtagttgtggccacaggccccagcttctcccaagacctcatatggctgctccattcttctccctccaaggcttggcaaaaactccccctctccttcctttcctctcccttttaatccagcgacccggaagtcctacctgtaccttctgtctagcgattggcccatggctttctttactgacagatcaagaaccaattggggaataggacctcagtatcagacctacccttacacataagatgtgcttatgacacaaagttgagtctgtgggccaaaacaaatatgataatggttgcattaaatttaaattttcttgaaatgtaatacagattgtaataaccttctgaggcacctggatttaaaatgatcttcatgaaattttttctgactttttttttcaaattatggtttcttttttaggattctaacctctaagaccctggttattgggtactacttggctgtatcaaccctagaggaggccatttgtcagacattgtctgctctgtgatggctgaaaacttttgcctgctaacagacatgccttcaagccttctctgtttttgtttttccagactgaattacatgagctatttcatgataaagagagagaccagggtttggctgcaaggttggggccagaggaacaagtgtagattcttagcatcattgtgttgggcttttgttggggagcagctggggctaaatgattccccttttggcaagacatagagggaaaagagctgagactcacaacatagatgtagggcacagcgtagagtaaagggagatcaatacagaaaaactggggactagccaaagcatggattgatggaagtcaaaattggctcagcaagatgggtcagtgggagaagatacttcctgctaagactggcaatcatagttcaatccttgggacccatatgatggaaagacagaaccaactcccattagatggcctctgacatccacatatacactaaagcatacaagtacacacacacacacacacacacacaatgtaaaatttgattgcacttttctaatctcttatttctgagttttgttttttgttttgttttgttttgtttttgttttttgttttttgtttttttgttttagattccttgtagggcgctgcattcttgcatcaaatttactttcacaagagacagttggctattcttgttgtctgggaagaaaggtctactttaagttctcaaagattaatcataagttaaagaggaatggccaatgataaggaagaaataacaatgtcctcatggatgagccctgcctagagggtctggctcttcacatctgggcctttcttttggctgttccagatggggtacctgtgtagcattaggaaagagatgaagggactagaactgactagggtacctgcagttattggagttcagctgaaatatctgagacacaagcagacaccagcccaggtgtcattcacttcctgtggacagaacacccccttgtggacaccatgaacaaaactttgattcccatttcttgaccgaagcaactgaggctggctagtttcaggagcccatccaacggtatctggcatgtacaaagcacctgtccttacctttagtcctcggaccactgaagctttcagtctgagctaaggtcactgctgcagaggacttgatgactctcatgcaggatgcttgaatatgcctgaattaagatgctgacacaggcagaccacacctcatttgtctcccttctcatctccagggccaatctcttctccagcctccaacttgagggcaaaaccaatgtccccatatggctttccatttgtgttgcaccaatagatgcaggctttgcaaaactcctctgcagcctccaggagtgaagccaatcaaaccaaatccctcctctcacgcaccctgacctcctcgattcccccagactctgggtgtgattggcagctctgccaggatctcccagatatgcccactggacagagacactgttggcagctgagaatgggcaagtgagatcagtcccttctcaggccaaggccaatgaggcaacgctatctgtctccaactaacagttcagtcacagagccactggggggagtttggggatgtctgggagcccaaaagctcctgggatgagtggcccaaagcagaagaaaaggggttttgttgttgctcctgttcgttttcaaaggaagtgagtggaatgtccatctgggcctgagctgggaaaccttctaagaaggcacactttcagacagtggcaaccccagaggatgaaatacatcaagtatcagggacaccacagaaaaggactccagcttgattcccatttttaatttaaacgtaatggaaaacacattttacactctgtgctatccccatctgcaacctcagatggccatgcaaaggtgatggcccagtcattaagccaaggaagtgttaaactttccatctggatcaggccaagaaaagaaggcaggcttccaataagataaagtgcccagttgcctgaaactcagtagtcagctggcctgttgtttagcgtgtagagccttaattccctccccagtgtgcatttagggctggggctggctgtagcacaaagaaagtgagctaggaattgactggctggctggggttgggttggggtagatgctgctgggttctatggtaacatgaatggagccagagacaaaggctctggcaccaggtcccctgtccacactgctccaggtgtccagtttgaaaagcaagttagagagtccgcagagctaaaggaagctaaggacttcccatctgcaagtcccatcctatgttcactttactaactcctttcagatcccaaaacggaaaacgaccttgctgggctagggatgtcactcagttggtagagcacttggctagcatgcaggacactctggttttgatcgtgtgcaccctagaaactggtgtggtggtgcctgcctgtcatctgcagcacttgggtggtgggaacaggagtatcagacatttacgatggtcctggggctgtgtaatggctgctaagccaacctggtatacatgagaatctgacttaacaaagaaaaaagaagaggagaggggggaaaggaagagggggaggaaagaagaagaagaaaaaagagagcagaggaaagaaaaagagaaaacaaagtaatcttgtcctcgagctcttaatcttgaaggaccgggtcactaccaacattttagagcaaaatgtgtctcaaatcaacagacacatatatgtgcacatgaatgtatcctgtctcacacacacacacacacacacacataacagagtgaacaacactttaaattaggtataacatgcagggagttatgaaaatcacaaggtacaactagcccccaagacacctgccctcaccttccagcaccttttctttcccttcttccttccctcccctccctcccttcttcccttctgcctttactaccccccttactatttgtttgtttgtttataatttctgggacagcctcattgtgaacctcagcctattggaactctcggtggtgctcttgccttagtctctggagtgctggaataaacgtgcatccgttcttgcccatcttgcctgcattgatttaacctaaaggatgctcctgcttctgaactgaggacaggtcttatagagcagcccatcagttgatcttgtctcttggctctggttcctctggctgtgtgatcgtaagccttgacttccctaaaggttgatctcagctgtgggaggagactagcatacgcatgctttgggtggccccttcaaggactaagtaagagagatagtgtctgggaagaaggggggatggtttagtcaagaaagagccaggcatgctagtgtgaagacttgactttgatccccagaacccacgtggaaaaagccagttgtgacagcatacacttgtctcagttgtccctgcactgcggaagtgaagacaggtggattcctgaagcttactggacagccagccttacctatcagctggctcaggtcatagcaatagactctgtaccccaaaaaaccaaggtggatagatagatcttgaacaagggcacatactcctttcgtgtataggagtatacacaggtgtgtgtgtgtgtgtgtgtgtgtgtgtgtgtgtgtgtgtgtgtgtcctatatagccattgattgtggcccttgctttcaggaaattcctcaggactcagcagcaatagaactgcttaggtcagatcctcagagcaggaggaagaaactcaaaacctccaatgggagaccagactccaggaaggacttccctgtaacagggcaagttaacgtaatttaaaaaaaaaaaaaaagacacaaggggcacccttggcatcctgagaacctggtgaaagaaaacccagtgaaaagaaaatgtgtctccctggggagaaaccagccccacccccatgtaggttgcccctcccctgtgaaacttgaactaagacagtcttggggcaaaatctctcccctaggttaccatgaaatatgtatttcatgcaggctttcaggaggtcaagcgaccctttctcttggcattctgggagtttcctgtggcttcacgtgtgcccagagaggaactctgaccatggggggaaatttaataaatgtggtttatctgagctccgtctctgtctaactttgtactaatgactggagtggtttgctgcttggagaccattatttttctttatttgctctagcagcgaggttctgcctgagggagaaaatgcctgggactgaggcacagacattcttgctcttacccctgagaggtttggggtattctcttggaacgtttgattccatttctgaagctctgtccagtcacggagaattatccctcactgcggcagaatccatccctagctggaattccagccggccagcaaggccagtgcccgcaagctctgtgtaaagggtttccattctgtgtaactgaaagcagtcatgataagtgctagcctctgctgaatgtttaaaacaagctaggatctctgcagcacaccttctgagcttagttttattgaagccacattctgtagatgtcatttttcgcccagtatagacgagggacatgtgaccaggggagctatacccaaataaacttgttactttgaagtaggagagcttagactaagatgaatttgtcactaatattcttggaagatggaatgttgccttcgggtggctgtgtcccttatgtaatctacatatctgcactttggcatatagcagtccctaaatggtacccaccacctcctggttttcacctaggaactgctgagacctagaagtgataggtacctaagccaaaggtcttatgtcccataagaggtgactttggctgccctgcttagacccatattttctgagtattcaaccagagcatccgtagctaaaggggacacccctctacttcccagcccctccttgactggaagctaagcagaggcatggctgacaagccattcccagcctgaccgtcagtcagttcccttggccacatgtcgcaaggagaagagttgtgcttagaaaggctttggtagcctcaaacacatgtgttgagctcatggcgtcctttgtaaaagcagatcccagccctcattttgaaggcttaaaaaaaaaaaatccccaggagaatcatgagaggaatcctaaaaatgcctccaatttataaaataaactcttgggatcactttaaacaaaaggacagatctagtctgaggaaagagaggaacatatgttttacatgcaatcacaacagaaaaacaatcgtctatcccaagtagctccactggacctggtgcagagacgtttccatcaaagcttccgtttagaagaccacacaccagcgggttgagatctgctgttctagacactgagaaaattgtctgttatagtatcgacatcccagaggtggggtcccacaatccacggcccacgcaagggtcagcagcctcctactctggccccatttctaaagtttcctctacatcttaattctaacatgctgggaaccttggctttaacacacaggccttttggagaacgttctagattcagaccgaggaagcttgatgtttctgtttttactttcatttcaggttcactgctggcctataacacaacctcccatacagaccagtcctcacgactgaatgtcaaggaaggtgagtctgtcctctcatgcgcccaggttccctccactctcaccaccgcacaggtccatacttctcagacaggtgggggatgctatgtctggacaccaattccttcctcgggaaactatttttctaggacacaagataaaacaaaaaacaaaacaaaacaaaacaacaacaacaaaacaataacaaaaaaagcaaactttttttttctttctaaagaccatgtttttcttcctctgccaccatttcagaactacaagggaggctttgaaagatctcataaaaacatcacaagaatataaattaaagtcacccccacccaaagaaagggggactgtccttagagaacaatgaatcggctgactttccaagctgacactttgggggctctcctggtgaagataatggaatgtatgtctaccttataaagttttgtttgtttgtttgtttcctaaaagaaaatttagcattttcagttcgtgtttaaagtggtgatctgaggatttggtctaggataagttgacctgttctggtttgggttggtttagtcaaacagttcatttgatataatttggttttgatcagcgagaaaaaaaactgtcttgaaaaaatggttttagtgaggcgccacaaggatgcttctcagagtcttcattggtagggactgacgctccagctctctggtggagtgcatgcacaacatgtgtgaggcccggggtttgatccagcaacacacacacacacacatacacacataaaaatgcacatacatataagtacacacacatacacacatatactcacaaacacgcatatacacatacacacaaacactcgcatatatacacatacactcacatatacacacatacactcacatatacacacatatgatcacacacacatacacacacatatattacacccaaacacacaaataaacacacatacacacacaaattcacatacacacacatgcatactcacatatacacatacacttacacactcacacacacacacaaactatcacccaacctagtcttgttttggccaccgagtccccaaatcagatgaatgatatttttgtgtgtgagaattgaagctctgcccactcattctacagtctgatgatctcctgccccatcatgttacacatgcctatagcagagaatacctatttgcatgatgaatacactgaggtctggttccctggttttgtcacatctctgtcctcagactcacgtcaggttcagggttcttccagggagggtcaagtcttgactgtaaagcaatcagcttctgaggatggctgacaatggggccatggcttgcaggtttagaaagaaacaaataagccactaaacagagggagaaaggagaggaaggatgggaaggaaaagaaagaagaaagatggacgtgaagggaagagcaggaagggaaggcgagttttgaactattgaattaggatttactgtacagcgtgctggtaccatcagaattaaccaatgagacttttgggtagacagaactaatggtctatctgctctgttcgtacaggtttaaatactggtttaggttgagaaactggtctgcagacaatgcagtcactaaccaagtcctccttgctgctgaggagttcagtgcagccctggccctgggctctacctgccaggctgagcccctcctccgctggcccttttgtgttgagagtgcatttgtctccctgccgcctcattcaggctgctcggagccgccagctcctactgggtagcaaccctcttctgaaatgaattgactgtagcatccaggcaaacgcagcaccggctgcccccattcaggtggtgatgggcatttatctcccagcctcggccctggcctctagagacgattaagccagtgctttgcaggtgcatcttttgttcccagtaaagctctccacttaggcgactgccttcccccttttgaggtagtctggctgaaggagccagcctgccacaaaataaagtacattagcaatacaaagctaacaaactcctcccccctttcaccctcttcccacctctctgcctctcttcttccctaatagctatctttatttttttaatattaaatggaaaaagaaatagaagacatcaatgccaccttgactatgtctctctttgaataagaggcacacacggcactcaatcagagctgggtgtgtgcccacgggtgcctttgctccctgctttgcaaagggcaggtgctagctggcatcaggcgcaaatgggagaagctgaggagatgaagtctattaatgtatcttcatggtacttatcaactagagtgctgctttagttcagaatggcatgatcgtcctttctagcctgcctacctcctaaaacactgactgaagctatctcagggttatttgtatgtagaacgtaagacaacatttcaaaactcaatttccacagacctgtaaatgtgttgtgagtctcagttatacccaattggaaccattgaacattttctaccttatttgtcaagtttaatgtacttaaagcaggaagacagcggttattgtcaaccatttccatagcagcctcggctgtcacttaaacaggattttggagtgtgcctggtgcgggtacatactttgttttggagctttgcaccattctgtgagtcagtccgctgtttttgtttcctttctgtgcagagaggtgggacaacatgaaagtgacccctgaatggtttgtagcccctcagagtatggtaaggaaagttcccctttcacttaagccactgtcataagagagaaatggttgttaccagagtctgggaaggccatgaatggaaaggttatagagggtgaggggccagtggggacctcatgcagctgaaggaacagcttctaaggcagagtaggaaaagaatgattgacagcagtcaattcaatattttcaaaacagctaataggattgtgtgtgtgtgtgtgtgtgtgtgtatacatgtttgagggcgtgtgcatgtttgcatgcgcacacatatctgtgtacatgcatgtggagactataagctggcgtcaggtgtttccctgggttgctctccactgaacctggaagccatccattcagctatgctggctgtccagtgagctccagaatccttcctacctctccctccttagctttgggatttgagagccacactgtggcaggcatatggcttctagaggctgccagggatcccagtctggactctcatgcctggtccacaggcacttcaccagctgagctgtctccccggccccagtgattacttttgtgacgtgatggatgtgtctgtgtctttcacctgattgttacacattgcagataagcttagtaacatcactctgagttctcaaagtacttacagtcactatatatttgaaatattttaaaatatgtatgatttaatggcccttattgccaaggttcctcctcaaaaacacagtcttttccctctagctatcttttcctaagtgtaatttggtgcagaaatttgaatttctgcaacatttttctctgcctctgtagtttttcactgctgcctccagctacatctctgttcccttttcagaaacaaatgtatacccagcctctactagaccttagccttccgtcttaagggcacagagagccccttgtagactttgtaaaacaatgacatccaaggacaagtcctctgtaacttccttctctggagcaacctggagccctggagctcactggatggaaatgggggctggctgccagaggctgcaggtagagagaagtgctttgcgttgactgctgacagagagagagtactgaagctggaagctggtgacgatttcactgtctttgaatgtgcagagtgtggctaagttatacacttgaaagtggttaaaacggtaaattttatttttaaaaaattaaatgcataaataacaacaaatactgaggctaaggcccagacataatgtgttaattctaaatctctactgggtacctacgggggccttggggatttttttcttaagttctagctggacaagccctgcttcgttgtactgaaggaacgtaaccggcacatccagggccactccaggtctttctggatccttctgaccttctctgtccccaggtcatcctagacaaagacctgtggatatactgattgtaagcacgggtgggtgaaatatctcacagttgatgatgtcattattactgttattgacaactaggtatgagtttagcatcttacatcttagaaactccctgctcccatgccttcatttggctctctaaaaacagatcatgtgttgctaacttgggtatatgggggagcactgaggctcaagagactaagtggcctttccacataagccttctagagccaagcttgaccctactcccttcttccctgtcctgcacactgaaatccagtgtgactgctgatcctgggtggtagatccaaggtcccagctttctctttggttttctgggcagctcctgccccagggccctctgcaagtgctccttgcccccacaataggcaagagtaggcacctaacttcagagctcccctacatgcctaaggccctcatttccttagccctcatcctgcatctatctcaatacctccagctctccaacaggcagcggatatagagctccttgttcactaacttctggacctcatagctgacaaggcctggcggagctctgagcttctaggcccccacctagagcctttgagacttgatgccgaaggtgaaaaactgaaaaccactgccctagctgccaagggtagatggcctgcagaagctccattactggcacttaccttgactgatggataaaaagtctgtcttcatacttgccaaggattgaaaagagaggggctaaatcgccccatgacacatatgctggatgcccagctgcccatttatggatcatgcttaagagagcctctcctctcaagaattccaaggacaagggccaagcatggaatagcaacccttctgtagtatctacttaccaaatattttcacatccattatccattatccacacaccatcaccatgagatcgcagctgctaccttcttgtccccgtcctgcagttaaggataatagggccaagagctcccaatgttccttagatgtcacccatatttggggcaaagcaagactacccgtgctcgcttcggcagcacatatactaaaattggaatgatacagagaagattagcatggcccctgtgcaaggatgacacgcaaatttgtgaagcgttccatattaaaaaaaaaaaaaagactctacccaacataggtttgatttgctccccataaaatgtgggaggggtgcttcccacattttaatctcaacatcttaagtatttgttaatgaatgttttccactcacctaaggtaagcacccagctcctctttcaatgttatactaatgaagttgcagtgtgattttgggcaagggtttgccttttctgtctcagtatattatttgtatggctgtcacaatacctgacagaaacaacttgacaggggagatagaaactttgcggttttggagagacttcagtccattgtggtggagaaagcatgatagagggagtgtttcgcagagatgagaagaatagaacatttggtagtgggcgatcccatggtggtggaccaagattcaatggttaagctatagcctttatcattagcctacccctagtgatccacttcctccaaacagtctctatctcctaaaggttcaatgaaattgtaccatccagtgggcagcgagcatccaaaagctcggagcctgtgggagatgtttccgattaagtcagaacactccatttcatcatgtataaagtgaggctaatttccatgcccttgtaaatcagcatgatgtctgacatgccaaaaatgcttgataaattatattcataacagttcattattatgatttatgacccgaatttaatagtaattaacattattgttggggaaatatatttgagggttaccagaggctaacaatgtgaagatattgtactctaatggatggtatagcgctgtgcaggatgctccaccatagctgagaagccaagctgctcaaaaccttcctagggagagacccctataggcgatgtcaggaagtgctgtcaaatcacattcataaatgcaaagtcacttgtcacattcaagatctccaaggggaaggaaggaagagccacagttgaaaatacctactgaatatcttttatacaaaacaaaaaaacaaaacaacaaaaacaaaacaacaccccccaaaagaatcaaaggccataaaatggttgagaccagccaaagccaccctaacctgaaagatactacagaagactgaaaatacgtcagaccacaagcatttagtatatgagagatccaagctgtataggactttttagtattatattagtttaccttttgtgtggtatgggtggtatgccatagctcaagggcagaggtcagagacaacacatgcagagttggtttcttctaccatgtaggttctgtgatttgaactcagatcttcaaggtttagtaacaagtgacttttctcactgagccatctccctggcccagtgtgttcatgcaaaggatgtaggtggtcagtgccttagtaaagaatggacctgaattctgtgagtcgttctgccttctcccagttgctcattgattctctgacttatggaggatttgctccatacaataaaccttccagaatcttggaaatatgatagccaaggggcgccaatcacacctgcagatgagcagtagagtctcagaaagtcgtcctgctgcctcctgcacacaccctctccatcggagttcagaatgacatcatccgagaggttatggtgtaatgtgtgtgggggtggggggaggggtgtattctggaaaagctggatgtggctatagaaatgtaggaggggcaactctgattctggggtgtgtgtaggcactgccatatgcctccacgtgtgttctgggtggtattttgaaaaaggtgagtccctatacacgtgaacaaagtgtcagcgggtggcatgtgtgacccttgggtaggtctccagcactggagacaatgtgcttaggcacttcatggtgagactggaatctcaggtatggagcccaaagcaggagccaggaatttgcctcaaaatactaaggcccagtggtagtggggtggagctaaagtgagattggccatggcttttaattgttcagcagagcaatgggccccagtaaggcttcactggactttttcccttttatgtatcttggaatttttctgtgactgtaaagacaatgataagttttatctgagtgggaggacagttaaacgagcagaatgtctgcattccacacctgtgtacagtgaacgagggtggcgtgctcttgggaggcccacattcagactgtgagtctatggggaggggagagtaggtgaacatagaaacaagaatagaaatgatgtggtgtgtgtgtgtgtgtgtgtgtgtgtgtgtgtgtgtgtgtgtgtgcctgtctgtctgtatgtgtgtatgtctgtgtctgtatctgtgtgtgtgtctgcctgtctgtgtctgtgtatgtctgtgtctgtatctatgtgtgtgtgcttgtgtgtgggtgagggtgtgtaattgtgtgtttctcagctatttctgtggtccagaggcaagatttgtgattatagataaacagtagctttctctctctggtttgtatttggttttgtttttaacttaaaaaaaaaatccagagttaatgtcttgtctgtttcctatctgaccctctttaagagatgtgtttgatttttaaaaatttttatttttacttacttattttcgagaaaaagtggcagagaaagagagacagagaggcagagaggcagagagagacacacacagagagagagagagattgagaaactggaaacaaagaatcgttgtctctgagccctggcaggcaggaaaccccaatctcaggggagtccagccagccagcccggccctggagtcagactccaagtttctgaattcaatttgacagcttgtctgggacactttctaagtaaccattatccttcctttctctaagtaaaagaactgttattcctgtcccagggtgtgctgtgtgctctgttattgcacacgtgtggccatacgatgacgagcacacggtctctaaaattactggaaacagttttcatgttccctaagacaagtgtaaatttgttccaggctaatgagcaaaagatttgaagtctcattccccaacctggtgagaagtaggtagatgggcgaggggggatgaggggaggggagcatttgccctggtgttgtgcatgtacacactattcttactaggatttctttgaagtacacacacacacacacacacacacacacacatccttcactgaccactatcctcagcgtaagcataagttctctccctctctcgtccacactcacatcagcctagagctgcaggttgcaaggagatgactcctctgtgttcaatctgcaggccctggaagcaggaccacactgggttctttggatctttgacatggtgttgtgagggattaggcagcagccaccccctctgttcatacttgaaatccaggggcaacgtgtaagtttatgtcacagcaccttctggacaactgtggatgcttgctctcttgggtctgccctcgagtctgaatggaactgtacctactatgccttcagtcaagcttgggactgtctctccacttaccccacccctacccagggacctgccgccccttcagaggccttggccctatagctttgcctggttctagtctcctctgccccttttatgaggtgttttgtttgtacccactctttctccaatttagtagtgtttagtattggacagattccagaggacagttttttcctctcaaatgactaaagcaccctggagctagaaaccattggatgggcagatgaaagtcacccttaacnnnnnnnnnnnnnnnnnnnnnnnnnnnnnnnnnnnnnnnnnnnnnnnnnnnnnnnnnnnnnnnnnnnnnnnnnnnnnnnnnnnnnnnnnnnnnnnnnnnnnnnnnnnnnnnnnnnnnnnnnnnnnnnnnnnnnnnccttccccttccccttccccttctcctcctccttctctttctttctttctttctttctttctttctttctttctttctttctttctttctttctttctttccttccttccttccttccttccttccttccttccttctttcctgtttctatcttttttcctttataacatatttattaaatacttagtcatggaagatttttctatgccataaaaccttattagtttaatgctatcattattcccattttatagatgagaagcccaaatcaccatgttggtttgaagcagggcagaatctgttctcacagtctcctccccagccgaggtagaagacaggctctgaaatttcctcttgtatttcgacccaactatgtcttaattactactgatgctgagggggaaaaaatgccttgacaaaagcaacttggggaagtaaaggtttctttaagctcacagtttaagattcatcatggtgagaagtcctggaggtaggagtttgaggcaattgttcacattgcatctccagttaggagttagcagagaagagcgactgctctgctccactgcctttctccttttaatccagtccaggatccaagcctagggaatggtgctgcccacttctacctcaagtaacctaatcaattgttcctcacaggcatggccagaagtttgtctccttcatcttgccaagttgacattaataacatcacagcatgccaaaagacccatttctttcaggaagctgggtttgtctaattgttaaaaccatgggactgcatcgattcctgcaatggttcaaaatttctcaatgttaccggcatttctggaggcatattagtttgtttcacaaatttttctgtagatatatttttataatttgcatgatgatacatgattaagcttttgagcttaattgaacacttaagagaaatgaaaaaaatgagcttcagtaaaaggcatattacactgagtaaaaccatttccatgtgttgcaatgaacttaatctgaaaaaacgagagtgagacacagacatgtcattagaaatcaggttgtcatgttccccttggttgatatgagcatcaatcatgaagaccttccaggatcctacctcacctaagctccctccatgaagttaacttttcctgcactggggcactgaggaaggaagctgtagctgactgttgggtccttagaatcgacagcttccattgcttctgcagtgttttcccacctcaacctttacagcccacactttgttctcacacttaatgacaactttagcttcttggtttacatcagcatcctttctgtcaccataggctggcctctcatgtccctgggccagaagacagcactcccctcagatagtcagaagttctcatttagatcaacatgactttcttgtgcctgtctttgcttttatgcatttcagagctgttcttagaggcttccagaagaaataaatgaggctgtaggtacccatgtatgtgttctgcgctgctaatgacggtaacggggaatgcacgtgccctggtgcatctctataaaggaatgtgattcctgtaaacacttgaaggtagagggccaaatgtacaaggctgtgggaagatatttgtgggtaatgacatcctggggaactttccaacctgactccattcctcctccttccataccagcagagagaggccttgactgtagtgctctgtggctgaagctctgaccatatcacacatttcttggtagcaattcacacttgctaagtaagcttggccttccttattcctctccagtcttgctgttactatatcagtcctgccgcctctaccaagctgcttcttgcgttaaagatctgtctcactccacagagtgaagctaaaactcagaatgaaattcattttagttcttaaacatcttcaccatgtgctctgatttgtgatggaaactaaaagtggtcctgttagctgatgttgagaagggtttcaagttaactggcaagaaaaggggattgtctacaagtgctgttgatgctcactggtggctacctcagcacagggtcgtccagatacgtgggctttgcccaatgtactgatttagctattccaggaggtttgtttagctatactggaaagtatagctggcctctcccatccagggcttccacatcggcagttttgaccaaccattgctagagaaaagagcatcctcttggacaagcaagctccctgtcatttcctaaatgacacagtatagcaacgaattacattgtgttaggtattttaagtgatcttagatgttcctccagcagtgcagtgagttagtgtgccttacttacacagcagtgtgtatgcatggaagtgataccccagtcgtgagatagcgtaagtggtccatcaatgactggaagtctttgggaggatgatcatgcgttctatttagcactgtaccatgagaatttgagcattatgggtcatggtgcatgatagagactctgaaaccatttaccctcacatgcaaaggaaagactatgcttacaaaaaaagcttattttcccaagcctttatctatcttatgtctgtctgtctgtctgtctgtctgtctgtctctatctacctacctacctacctacctacctaccatccccgtaaagaaaggtatagatctgtcttttttttcctctctatttgaagaaggaagaagagagagaagcacagacatggaagcccctcttgacgcacagggaagaagtgtatcttctagttaaaaggatgggctgtaagcagcaccatttattattttaatatgaaaatcttttatagatgtaacaaattcctctctttggagaagcctcaacttaatatcacaaagaaatcatttctcctgtagaatccccacggaagagaaggtaaagtctttcaggaagaaagtctgaggctggcatgggggtgtgagggctttcccctcttttgggaatccgcaggtctcacaagtaaattctgagacgcttcttccgcctctttggtacagcttgaattcatgtcaggcagaagccacagagagaataataacattatgtaagataattacttatatgtcaaatcccaaatcaatcctacctgctcagtgtgtttaccttactccgacgaactgtgtctcttccctaagccctgaacccaggagctatttctgaacctaattgcagattatcttgtcatctttaattgtgacttttgtccattattcttttctcccaccccaaagattttcagtaaataaccttgacagttgatggatttgctgggaaagaaaatctaatctttttcaattgagttaaatatttactcagtcttgctctactaaaggaagaatcagaagaaattatcttagcacaagaaaaaatttatttctagccaggcagtggtggtgcacacttttaatcccagcatttgggaggcagaggcaggtggatttttgagttcgaggccagcctggtctacagagtgagtgccaggacagccagggctacacagaggaaacctgtctcaaaacaaaaaacaaaaaacaaaaaaacaaaaaacaaaaannnnnnnnnnnnnnnnnnnnacctgtctcaaaacaaaaaacaaaaaaacaacaggaaaaaattaagttcttatctcctatgaataaaaaaacctggaaaagaatagtttggggaaatgtctaatgggtaaaatactgcacaaaggtgaggttaaattcaggtctgcgttacccacataattaaaaaaaaaaactgggcaaggtggcatgcatctgtaattccaccctgagaatagagacaacttgaacctaggggctcactggtcagccaatcactggccaaaacagtaagcttcaggtccagtgaatgaccttgtctcaaaataacaacactaatcctactaaataccaataatgatatagaatgcagtaaataggaggaagatactcaaataccacctctggcatccacatgtgcataccaagatgagtgtacaagcacacacacacacacacacacatacacacacacacacacacacacacgcacacacgcatgcacgcacatgcatacacacacacacgcacatgcacacatacaccaaaatgctgactggaaaagattaactacaattccataggagactttggcgtgtgtgaagggtttgtgtatacatgatcttatctattctccaaagacccttgtgaggattaaatatactgtttgctcttgcatggtctgaaatttacaaaatagtcaattgtttctcacaagagtatacttttcagagaggggaagtcactcaccaaggtgcacacagcacataactgatgatctgggaagcagggtgcagagttggagtgacggagatcccgaattctttcctttgcagtgaatggctttactgtttggaaaccatgagattgcttcccccaaatagctttaaagctttaaatgacaccccaaaacagtccagttcttgataagattcagttattccaaagaaacacaagcttctcgggatataattttgaaaactctttgagcctgaaagcgttggctggcccagttactcaccagtcctgcccaatagcctaagatcagtttaaagaaagtcagttttgatagtctgagtcatattttcaatttctaataaaattcttacatggccacatacgctgtctcccagctttgaacctagggtctcatgctcatttgcatgtctggtttagatcatgtctgggatcccttgaagtctgaaacagagcttgccattctgtgatgtagtgggaatagattcttaccaaaactaaggccattttctcagatactcggatgtaagattccacgtttgacattgcctgctcacctgccagaccagaacaaagtgatgcagtctcccttagtctgacctcacctgcccacttctcctatgatgactccaaagacatgtcccctggaacccactttagcattttagctgtctgtcaaaaggccagtctcgggaactgctggtgttcgaagtttcctcattagaatagtcatcttaagtcatggatgggggaaatcagactgactctgaataacacgaaaccagcaaacaatcaaaagatgttgtagagcttttaaatgtcactgtcctccaatatcaacccactcatactacatgtgaaatgacaaaatggaactagctgtcctgaaagttgtcactgtcaatatgggacaatcccagtacttttcagaggaaaaccatggagttcccaagagctccaatttaatcatgttagacagtccaaatctttgctcaaattctgttttctgaggccctcctacccagccctgcctactccctcttctggcttgctttgctccctcacacccagcagcttcttctaatctactgcattgtttactatttgttctgaattaagttccacagaagaagggagtttgcgttgccagagttgtattctaggcacatacgtgggtctggcaacagagcaggcattcaacacaacttcattgaatgagtgagtatgtggtagggtgtgtccactaagtccaataagctagtactggggtggggcaagagcaaatttgttgagggggcagaagtgactaaggtccggtccctctgctgcagagatgctcacctagccagagaggtaacacacttgacactggatggttgagcagacagggacagtaagcacgaaagcaatggcccgaaggactggaaggaaggtgtgcaaaggtcaaatcgtgaggcagatgcaggatgcaatcgcccatggcaaaggaggacgtcgtataggcagcgtggcctctctgtgtgcagagccagagggcaatcataaacaactctttattgcctaaatgagctgttgttttgcctttttttttcctagctggttttaaacctgacatccatctgaccaaagaagtatgcgattgagtcgtgtctactgtaacccagtgtggaggggaattttgacaaatacccaattcagctagtcaatctaaattcctcttccacgtatggctcaaagccccactttgaggccttatcaaaataaatagtttatttagacatctgtgccatttggacagcgagcccacggggcagacaaaatgaaagaagagcccaggctgggcaggatgccttgcaggaaggtggcaaggctgtgcccagagaatgtgcctcttactttgtcaaactttttgtatttcaaagccgccccgtgcctttccagcattttcctcatgaatcttcttttccctctgcacacagaatatcttaaacactacgtccattgtgctccgcgcagtggtactggtcctgaagctgaggggctgcttgaattccaggacaagatccttgagaagaggaaacttgagccaggatgttttctcttgcttctttgagttccaagctaaagcaaaggattccctttttaacttcctctccctgcagtcttgagggatgccaggatcctctgtagctctgtggaacaaaaatcccactggagggaaggctgggtgagctttagggaatggatcaaatgaggtagaggattcatcctgagcctctggaccagctaaagaggaacctgagcactcctcagtcatggaagaagcaaaagctgaccgctcccagctgcccatcgctgtcttctgagatcatgtttaaaaccagggttcaggatgacccaccactttccttggaatgtattcctggaataactgtttgagggcgccaggttagagttggtctttggggattcttgggcctctcttccttctcaaggccttcctgtacgacctttatgacctcctcttattgtagaggtaaaggcaagatggaacaggcatctatatatcatgtccaaagttcccatctatggaaaacacaattgattcccacagcaggtctgttaagatctgttatcatgctgtgtagggaagcagagttgaagttcaaaagacaaaataacctaaccaggggattcagatgaatagggacagagctgggattagattccagggccatggatggccactgagaccaccattaagccctagaaaaaaggagcactccccagggacagagccctaaactctgtttagactgcccattttcttcgtaagtttcttttgccctggatttaaagtaggatccaggccagtaagtaggtaagattcttagcaaatcagagatgatttcagatgagagactgttccagagttgtgaactgggggttcaggaagcatagttagcttttgtaggaggtgttcagcccaaaggagagtccaaagcagagaattccagtcaggttggtggtcagaaacatccatgcctctactgagatagaacctactaggagaacatgacctcgaatagagactccactgagaggatcatgtaggcacaggccctaggacatctgaccgtccccaaacacagatgacaccttacttattggcatcactgaggttggcaagcagacccaggttttccaagcataaacagcacagacactgccagcctggccagcaaaaaacagaaattcagcgagaagtgaatcttttttccactaagcatagagagcagggggcccagtgtggtgagggactgaaagagaggctgctgtgtgctgctgatggctgtgtgtgggtgatgtcatgacagggtgtgagctgcgtacagcctgatgcacctgcgtcttggacagttaactggaggcatcaggagaaaacaaggtattctcagagatgaaggccatatttccaggaccagtttaaacactggtgcgtctatgccatggtcacagccagcaaaagccttccctttccaacggggctcagagctcatattactctaccctaggaggctgtcttggaatctaagagaccatttagtgtcgcattcagccacactgagtattgcataatggagaaactgttcagggcgccgtagatgggaagcagaattatccacaatggctggcaaagcccagaatccccggcatgaggcccaggtctctttgctttggcgagaactgacctcagggctgcctgaaacaagaaaccttaggcaaagcccactggtggctgctcagcaaaggaatcacaataggatttgtcatcttaggactccttaaagccagggggtgtcagccttccctgaggcagaaagagagtttgtcagaatcagggcataattttctgctgataaagccatctgccaccacagagaaggtctaagagcatcacctcgggtgctggccgggattgccacatttttgacactgagtctttggccacctcagacttttcttctctaaagccagatgtagctgtcaggatgcgggctccatgtgccacatgtggggcgtctgtatgtgtgcacttggctgcttggagccgccacagcccgcgggagaacgctgcactatctggcgctgaccatagccaggcagcatctggctctggagccaggagtgtctgtaggaatttgtacagcaggcttgcccccttctctagcttttccgagttgcttaccgatatgtctgtcagtgtgcctggtactgtagctgacctcactgccaggcttttatttgggggacatttaataggagaaatcacaatccctcattttaacgataacactgccctgtgaatgatggaaccagttctgataaatgccgcctcgcttattttttatccccacgtaaatatcagaatatgctttcacaaactaagatgccgatgaccacccaagatgacacaacattacgggaccaccatcccttgtgctgtcccctgttgatccaggcacataaatgagtggtgcccagctcctgacctccctgaaggaacatactctcagcttccacttcaaaatgggtggcttgctgctcagccggtgttgacatagtctgtagtccttatcaccacaggcctgaactagctagagacctagttcaagaaggtaagcgtcttggattcttttctgctagctgacaacaaaagggattgtgtgcatttaacaaggagagacactgctgattccattcgttggttcgtgtgtatgtattgcatgtttaccatgtatggctgtgaggacctggtgtttgtgtgtggaatacaaacaacaaagatggatgaatgaatggaaaaggagagtgagaaggatggggagacgtagaggggatgcgtatttaacaaatgggccaatgtgtttctgctccaggtgtttttcagatgagtgagaacagcacagatcatctcaacgctaacgatatctttctcctaaaacatggggcacactggtccttgtgctcagtggtaacttgaccctttcacttcagctccaaaggtctccaatgctttgagcatccgaggcagctagatgcccttggccttgggctttctcatcttgccacctccctctcaaaacactggtttttcatttcagtcttgcacgaaggagacataccctgcaccacaactcctctgtggtgcattcaccagcttgtgcagtaaatgggcaggccctcacactgctttgcagattcagaggccagagaaaggacgtctgcatatgtagaggggctgatgggagagaagactgtattttccatgtttgattccactcactgggtcacacagtgactgaagatgcctgctgatggcatggccattcattgctcagtgaacttcatagtgacagtgttgcaaggctggtttatggagtggcttctccatctgtatcacttctgccttcacttatggtaggaccgagtagtactgagttggaatccccaggagataggcttatgggagcatctccctgcgaactcagcatcccccaccttcgaggtctgctgaatcttagactgaaaatagaatcttagaaaagatgggctgctgtggcctacctcaagcttcaacttcaaaacattattcctcacctagaattaccaaagaatatggtgacgtcctaggaaactaattcctacattctgggacagctttcatccaggaggagggctttccgaagcaagtgtaggttgaaatttttaaggcagattttacaagtgctcgagacatcagatggcacacatcatctcctggaacatagtgggtccttctcctttttagttactcacctggctagtttcacgccaacttgacataagctacaggcatctgaaaggagggaacctcagttgagaaggatgtaagtctttatcttaattagtgatcgatggaggatgctgtaacgccaattgtgggtggtgtcatccctacattgatggtcctgggttctataaggaagcaggctgagcaagccatggaaagcaaaccagtaagcagcactcttccatggcgtctgcatcagctcctgcctccagatttcctgttctagttcctgtcctaacttccttcattgatggtcttgttacctgggagtataagtgaagcaaaccctttcctccccaagttgtttcactgtagcaatggtaagcctaactaagacacttatatttatcactttccaggtcatccactttctcttctgtccttacaaaatgacctccacttcttagggcctctgtgctttccacacagcatctggaatgtgtggaaatgtctttgctctatgtctctcagagtcactacatactgggaacccccttggccgtatcgtttgaatgatgaaggccctaaaggtgatagcttagttcctacaaggtcccaaagggccacccaacccttccttccttgtccttttcttctctccctctacattcctgtatgccagccatgcccacagtaccactagccttttcatggctctcccccacccccacccccgaagctaggtcttgctcaagtccctaaggcctctagtgcttcttgccttcccctcctttgtctccaatagttattgacatctcaaccattcttttgcacatggtcgtaatacctcatagtctttcagactgtgtcatgtctaaatgcaaggactttgttttatatgactgacttctctagtgcatgcacacagcaccgttcagaatgttgattctaaatgattgacaggagaccgaactaatcatattccaaaacttagctggctcccccttgcctgaggcttatcctaaagctgaatgcaccctgtgggactccacagatcccctcagaaagtgtccataaagctatcaacctcactccaagcttataacaaggctagttgacttaagctgttttcaggaaacaaagaaaaaaaatagatcaaaaatgaaaaacattcaacttaaaggagctgtgtctccttgtcctgttccctgcctccctctccaaccccacccccatgctctgttttgcttttcgtgccaatggctgaagactataattttaaaaactgagctgacttttccagacccatgaagaatgtgcgtgtgcacatggatttttccacaaggacacttcctgtcttttgggttgtcttagccagtaatagtgaagccaggcaatcagatgcatctgtccattcgtccatccatccatccatccattcatctccccagcccttccttattctaatttgtttgcgaggctcaggacaggccaaaggggatggtttgtgtttcaccctgtcagacagttgtttgatgaggtttgtgttccatttattcagatggtttttatggttcctttgttgttaagggaaagactttgaaagtcataattctgtatccttatcccttctggtaggcctgtgccatgtctcaatggctttctcacaatgagaaaggaaatgagtgtttccaggccgttacttgagcagtttctgaacatggttgtggaagagaaaagctgagtcaaagttcagggtccatatagtgctggcctctcccatctgaaagatctctgtcggttcattctctgatcagcccaagtcctcaccacaattctggcctgacctctctgtgggtggttataagaccctgcccctttctgctacagacatgtctgagagccttggtcagcctacaatgtggacacatgtctgcatgtcattccatagcaccaggactatgaggtgcgaggctggagttggccttacaggaatgtcatgggcctggaccttgagacgttcttcctagagaccttcatctagacatcacctcttagattttcatccttgcccaacatccttgcatcagtgaaaagagtttgtatttttcccttgatttatagtagtttatctttttagaaaatcttgtaaagtggctcacaaatattctcacttgatccttagcataaccccagaaggtagataattcatatacaattttgcgtctacaaagacacgggtcaggggagacctgtgggcttcccacgtctcacaacaaataacagcagggatagcgattgagccaatcctccaacttgaagttcaggattcttcctactgcttcagctcccagattagacaaataagatattagagtaaatattactcagggaagacgatacttcaggaatgtagtggtgcttaacaagttattgctgaagtaaatttaacttcttctggccgccaagagagcatcttcatagaacgaaccttcctgcaaaacatacagagctgatgtgtcctcttttgttctttctcatagacccttcttatgactctgtcaggagaggagcatggaacaataatatgaactctggcctcaacaaaagtaagtaaataggaaaccatttgggggtgagtcaaatgtttctggagagccagaagttggggtgtgggcgtagggtcataagacacacactaaaaacaagtgttggtcttcatgctgcctgattagatgtcagtgtgaatttgcagtgcctgctcagatttttgaggtttattttgtttttttttttttttttttttgctatatttatgtgtacttggttttagaacttataaggtttgaggttttctcgggacaacttgatttataaaagaaaagtaactcgtctggattttgatatttcagtcaggacgttgaatctctgggacatatattctccacatgacaaggctcagtcaggtcaatacccctagccctagttagagagattaacatgaaggataacctaagggatgttgtgcatcacagacattaatttgaccaacagtgatcagccgatgatttgttgaaatccacccagtatcttccattaaggggcagtgaaagagagcgattcactcttcaaccaacgtgtccatnnnnnnnnnnnnnnnnnnnnnnnnnnnnnnnnnntatgagtgtgcagtgtttgttcactctgcatgcaggacatgacgctatgggactcacaaagtataagccaggcaaggaccagttatttaggcaggagagagaaatcatggacacacatatgtcttcatctgggttgtattaaagagttcttgcgcacctgctaccgttagagctactcagacaggccatgtctagggaatgtctagggaacaggagacaggtaaacctggagagctagatgtcagggacgaccatggtggtatgtctgacagtgaggaacctaggtttatggagtttaggatgcagagtagaccaaaagataagaaagggatagtgaatgataatatggaagtagattccagatcttcagtcctaaggagtgctgaagagtatgtgagtcagtttgaagtatgagaggtccagttacaccgagccacccatcacacaaaaagcagcatacattcaaaactggggaagccagaggtcaaacatgaacagccttggagaggctctcacgaaacacagtgtgacaggcaccaggtggtctgtgctcaaatgacactttctcaggagagacctctgtattgccatgtctatttgtgggggacacgtgtgtacatttgggggcacaagtatagccgtgtacccatgcacatacatggaggccaaagagagacactggctgttctgttttatcactctgtgcctggtccctttgagacactctcttactaaaccctggagttcaccatttctcggctagcctgactgtccatcaagcctcggtaatcttctgatctgtgccaatccctctccgttcccaggcacgtgttagaagtgcacacagacatgtcaagtttttatacggggatgcttgggatctgggcccatgtcctcgtgcagcaaacagtcttaccatggagccatctcgaagctcaaggtcctacatttcaaaagaatggtctaaccccatgtcagcagacattgttcagtgttttctcttctgttaaaatataacttcattgctaactcttctgccccgagaccagtgccagcgtagcgggtttgataggtattcaggaataaaatgagtctgtgagtccatgggagagtgtggtcccggcagctcatgtgccctccttctgggagatatgtaaagggagcattttctgccacttttcttgatttctccacaggtcctctccttggaggatcacagaccatgggcaagaacactgagcagcggccccagccaggtatgtgattcaaatatgtagcctctcacttgtgtgttatacagttgtggagtcagtcaatggtggagcaagacagtgtacagttggctgtccatatctgtgggttttaggcctggggatttaaccaaacacaggccaataatattcaggaaagaatctacatctgcactgactgtggacagacttgctttcttgtcattattccatcaacaatacagtacggctctttgcatagcatatgtgtcatgatggtaatctatgatttaaggaatgtggatggatatgactagattgtatgcaaataacccattttatgtaaaggacttgagcagccacagatttcagtatccttgacagaccttagaacaaatcccctgtgtatcccaagaggcaactctagttcacacattgtctcttctttccaagagagtatctgggaattaagcagcaagtcctggaaccagggagcgatctgttaaaaggaacttaaaactgaaatggtccaatgccttatttcgtggaagaaaacaggggttccgaagggtgaaaggatttgctgaaagacaagcagagctgaacttctttaagttccagagcccccactccttgtccaagcattttacattttacgaaaccatacagaactgccttcacctagtagatacgcagtcaagacataagaccttttgaagctatggacctggagacccttaataaagaaatgacttagagactgcagtctataatccctcggtagcatggcctcttatgatgggatgcccttgtttctgaccctgaccccgcccctgctcctccttgcttgcttcaacaaacaggaagttgacaacctaccttgacttaatccttttctgagccagagccctctgttcagctacccctctggccacttgtcttctggggagaggtcccacaggaagaccctacacagatctgaggagagccattgcactcagctctgctgtcttaattaagaatctgaattaagatctgaacaagctatttgctttggggtgtgcaaacatggttcttcatttccagccaaaatatagaaagagaaattgtagtaaaaagtgaaattcaagtgaaaaccaagtcaggtagagcaaatttttaaacaagttccaacaacaacaacaaaattgaatatctactcaaacaatttcagtttcatcaaaatttaataaaaaatgtggactgaaaggcttcaagaactgttaaatcaattctttttaattcattaataattactattataattgaaaaaagcagtgtgtttttaaaaaggagtgacttcatagctaaaatacaaattctgcttagtgttgacattttcaagcttaaaatcacagagttttggtagaagggaagagagcccagcagcccaacccactcttcatagctgagaaaacaaatacccagaggttgtccaaaccatgatttagttcatgacatagctgggactagaacccaggctacctaatggtttttatagtccatcggaaaactcagacatgcgtaatgtcttcagcattagaaagatctattaatggctagtaattgctgaggaacctgctttaagcatgtttaataagcaatccttcagttcattcactgcctggttgaatttagccagatgctttccaaacgtgtgggcgattttgtttggggggtagtgacagcataatctaaaagtttagaaaccaggtatgaagcaagagtgctattactcgtctacgttgactgggccataactttgatcaaggcctctaatcaagctttcctatggccctgagataaaagtaggaaccgttgaagtctccttcatcttgatgctgctctcagattatttgctgaggaatgaagtaagctttttttttctttctagatccttatcagatcctggggccaaccagcagccgcctagcaaaccctggtgagttaacttgaacctgcaagcctttccctccagagcattcgttatatctgtaaggttacacagaaaccttactcctcggtacggtacaggcacctgtctggagactgcatgggcttccttagtcaaatattcaactgtgcacaaacaagaggcagggcctgttcatgagtagcagggtctgctgccacaagacgtttctggagaacaagcacctctggacagaggtttatgtccatggcaaatgactcagatggaagctccccgttagggaagctattctcagttattcctcatccagggctcatggataaatgtccccaagtgttgtggttttgacttgagtgctatagttatccagcctttgaaaaaggaagtgcaagcatcccaagagagttgcacacacaatgaacgtgacaagatgtgaaggattcactattaaaaataactctcggatgtgttcttctaaacccaaaccatggagatggggagctcaaggcaacaaaagccaggcccacgtgcctgctgcacctgcagtgctacaagctcgctgggcctcctccctaacctttagctaaaccattcctgcccagaagataaaaagccatccagcatccagcccctcccgttgcctctgcccatgcggaactgaacactaagagccgtgcacttttctggaaaacagcccagcttagtgaaccccaattctatgaggtgccttctctctgctctaccccacagccaccccccaagaggttcttggatacttgacactctttaaggccaatgttgaatagtttgagggatttcagtactaaatggagattagatagtgactcaggtctaggtagaaaggtctaaggggagggtcaaaaatcttaacaaaaggatgtggaaagttggcttccctgagatcctaagagcttgggacaaagccagcattcaccacaaccatcctttgggacaatctgtcttaagatctaaccttgcttactacgctcattttggctgcggcagtagagtaacagtatatactgtaccctttttttaagatttatttattttatttacgtgagtacactgtatctgtcttcagacacaccagaagagggcatcagatcctattatagatggttgtgagccaccatgtggttgctgggaattaaactgaggacttctggaagagcagtcagtgctcttaaccgctgagccttctctccagctccgtaatgtacctttggaaactagctggataagccggtctttgatgatgagcaagcttttgaagtgatgggtgtgtgaattgcccctctgtgattgtcaaccactatgtatgtctgtcaaaatatcaccacatgccctgtaaacgtgtacaattatcatgtgcctatttctgttttctaaaggaaaacataaagggttgtctccactttccttttttgttttgttatttgtttgtttgttgttgttgtttgtttgtttgtttgtttgtttgtttttccagatagggtttctgtgtagcagagccctggctgtcttgaactcctagaccaggctaacccccaactcacagagatccacttgcctctgcctcccaagtgctaggatcaaaggtatgtgccaccatgcctaaccaataaaggttgtggtggtggtggttgttcttgttgtggggaaaggacatgagttgtcatgtttaggaatcagaactgagactactgttcttctgtttcctcctgcatgcagggagtgggcagatccagctgtggcagtttctcctggaactactgtccgacagcgccaacgccagctgtatcacctgggaggggaccaacggggagttcaaaatgacggaccctgatgaggtggccaggcgctggggagagcggaagagcaagcccaacatgaattatgacaagctgagccgggccctccgatactactatgacaaaaacattatgaccaaagtgcatggcaaaaggtatgcctacaagtttgacttccatggcattgcccaggccctgcagccacatccaacagagacatccatgtacaagtatccctctgatatctcctacatgccttcctaccatgcccatcaacagaaggtgaactttgtcccgtctcacccatcctccatgcctgtcacctcctccagcttctttggagcagcatcacaatactggacctcccccactgctgggatctatccaaaccccagtgtcccccgccatcctaacacccacgtgccttcacacttaggcagctactactagaactaacaccagttggccttctggctgaagttccagctctcactttactggatactctggacttaaaaaggcacagtagccttgaagagataagaaaactggatgttctttcttttggatagaacctttgtatttgttcttctaaaaaaattattatttttatgttaaaaacttttgtttcctctacctgaaaaaaaaagatcattccatgagccagtccaccagtttggattctcaacctcctatcatcgaatgagttaaatatttaggttactggaacggtttataccatgattctgagaaaggagtacgcattttctttactcttttttttttatgaccaaagcagtttcttatcagcacacgggtctcatcattgtaggattccctacgatcatgaatcatggacttgaccagggttggtctggtttgagacttagtaaaagtcaaggcaggatgtttataatcttatcttaggaggactcaattcagtggatggcaactggaacactggctctgaggccagtgaagttttttgcccaactggaatttaaaagatgtgtgtctatgtgtgtatttaagaagccattattattacaaaattcctcacaatgggcagtatgtgtttgggtcactcttctcctcagaaatagtcagaatatgaacaaagaaagtttaacacaaactcagacactcctgacgggcagaggattaaataacatttttttggagggtttaataacatttttggaggggtttttttgtttgtttttgtttttgggggttttttttgtttgttttttgttttttggtttttggtttttttttgttttttttttttttttggttttgatttttaatgacagtgagtcccagaactttgaaaagtcatggggatttctaaactcagattcgcaaacgctgtgcgtttgtcagaccaccagaccaaggtcaaacaatcagaaggcaactaactgtataaattatgcagagttattttcctatatctcacagtattaaaaaaataaataattaaaaattaaagaataagtaaacgagttgacctcggtcacaaatgcagttttactatcaaatcaatcattgttatttttttaaaatataatttgtacatctttgtcaatctgtacatttgggctatttgtacgtttttgtaactgtttttttttaataagcataatgtgactattgaaaacgaggagttaaaagtcactgagtttttaggaagaaaaacctaaaaatacagttatttaacacgcatgcccaaacaagatctgtttagacctacaacgctttagaaatgtttgtaaataacagagttgcaataacctgaaaaggacaaacaaacttttctctgtgcacacgaggcactctcctgctctatatatgcaatatatttttagatgtgcaaatatatatataatttttcaggtaatcgtgactttttaaacgatattgttaaggtgacaactcttagtccactgaagactaagttgtaaaataatttgaccttaataaattgtgccttcttctttttcttcttctctcagaactggtgacattgttttcttatttacttccagatcaaaggctttcccggagggaagttgtttttattgctggtgtgtgtgtgtgtgtgtgtgtgtgtgtgtgtgtgtgtgtgtgtgtgtgtatgtaagaacacacagcacacatttaaaggtcagaaggcagtttttatcaaataaatcagttctctccttccatgttagtttttgaggcagaatctcttggtatgtctcccaccctgtggactccagacacacaagcttccaaaaagctctcccgcttccacctcccctcttaccacagagcagtgggattgtcggtgaatacctccacgtatggcttctttcatgagttccagggatcagagtcagtcatcaggcttacaacgtctcacgtttatccactgagcccatctcattggccccgaggaaaaaaataacttgcctacttattcttgtaccatcgataatctcctaactgcatgtgctgcagtacagtggaagacacagtattctgtgagtttcagatgcttgttaacaatgacgattttaaagcttctctaagccattaagatactgtatgacctttgtaagtgagagacagacctaggtaaannnnnnnnnnnnnnnnnnnntgagagacagacctaggtaaactatatccagggaactacagcagcaaccgtctccaggacctggccaggtagacttgactctgttccccacaagaaggcgacctgatgcttcagcagagaacaggagtctagcctgacttcaaccccacactagggtcttacgtagactctctggctctatttttcagcccaatagagaagcttgcttccaacggcttcagcgttaagcatcatgctcctctcctttacaacaaagatgactaaaactagaaatagctggtgttgttgcagggactctcatagaactagtagctctagaaaccccttaaagaagtttgcagcctctggtcctcacacagagtaatttctagaccaggtaagcctacgtgaagaagatgagaggagttctgaacactggtctccaacttctaaaacatgcaccctacattataaaatacattaagaacatatcctttatgtttatgtatatgctggtttgtatcttgcattgacaaaatatataccattatacatttgtagatccctccaatcatgactgaaaatattcagaaagtgttttaaattattgggtaaagagagctattgaggttaagagcaattgctgcccttacagagaacccaggttgggttcccagaatttacatggggtgactcacaactgcctataattttagcttccaaggatctgttgccctcttctggcctcctcagatatctctacactcacagcatatggttacacaaacacacacccctatacacataaatgaatagttgcatctttcctgaatatatactgactctttattggcattttaatcaaatcatgagtgataacaactaattacagtgtttaccttgcacttgatatgatacattatgtagatgtgatttaaaagataggagaagaatatgtaaacagtgtgccattttaaataagtgattttggcatctatggattttggtgtctttagggtagtcctggaacccatgcttatccagaggaaaataagattaaatatttgttataaacaaaaagatgagattttagaaggtgatatgaaaatgtttaagctgacattctgttttcttcccttatttatattgcttcatccctggttccaacattcaaaacggaaacagtgaacattactgagacgaacacatatatttacattcatacatttgctttctagcaaagaataactacttggcattaatggctcatgcatagaaagacatgaggcaagtcagttatgttcataagtagtcaactttcaagtctcatagtcaacttgaaaggtctcatgtcagtttgcaaatctacaaagtcctattaagggggaaattgagaggcacatatccctgatgcactgctaaaagaacaggatgctcacaccattagttcacctttaaaaacgtgtgtgtgtgtgtgtgtgtgtgtgtgtgtgtgtgtatttgtgcatgtgtgcctgtgtgccacctgggtgctggtaactggagttgccagatgaggatgcctacatcctaaccctgaaactggagttacaggcagttatgagctgactgccatgtgagctgcccaacatggatgctgaaacacatgcctatgtcttctgtgagggcaaacagtttcaactcctgagtcatttctcagccactggttagccctctagacagttttgtttcctacacaaagctgcaatgctttctcacaatcctgtacccagagtgtcatggtggttcattccatgatccaaaagctggtctaccctgacaggagcagagcaatttcgtccatcaagccttcgctcagggaggaatgacatttagtgcccagattgaatggtctcagctgacaaacaggcatttatgtcatcctgactgtgagtcccctctaccactctgcacttgtgccatgaaggccattacatctgataaactgtggcagcaaagcagagagggcacagcaaccctgtgagggactctaatggaaaccgatcctctccatgtccccacctcagctccggacctgtccacagcacttcagagcaggtggctgtcttagtccatttgagaagtcatggcagactgctgtaggctcgctggcttataaacaacagaaactcagtgttcacagttctggaggccagaattccagtgccaaagcaccagcagatttgtcattgatgggggactcactgtttattcctgattcacaggaggtcccttcgcactgtcctctcacagagtcccaggcagcaagcagctttctgacatagtgtgtgtgtgtgtgtgtgtgtgtgtgtgtgtgtgtgtgtatctacgtttattcatgagagctcctctttataggtccacctccaaatagccacacattggggattaagctttaatatatgaattttacaggggaatggaggaatattcaatctacagcagaaattttaacttcctggtgtcaaaatattgttgctacccaaagaaagttgtattttcaatatctgttgctttgaaaattttttagaagtcaaaaaacactagtcatttaagaacaattaaagtgaccaataatacctgcatgcagttggggaatgagaataacacatgagttctgtccatggcaaatgaatgagatgtggtttcataaacagaatatttgcactcgaaaccaagtgggagaaaagtatccagaataccaaggaagaaaacaatatccattaatcccaagcaagacacagccagagcaagatattatttgtggatattttaaaaaccactgcaaatcaaagattatttttaaaaattgcatctatattcaatgtatattaatatttgattacccctaaatattatttcactattatatataataatatttataaatatataaggcattatatatacaatattctcttattccataaataatacagtgcaacaattatttccactgttctactgcattaagcaatagaagtaatttagagtgatttaaatatataatgcataaaatatatagatgcactatgccattgtatataagggacttgaacaaccaggggtttgggtatctctgtgactttctgaaaccaatacccttcaaatttcaaggtacaaataattaaagttttttttaagatttacttctcttactttatcttatgtacatgggtgttttacctgcgtatacacatgtgtgccacgttgagttccctgtacttaaggaggtcagaagagaagggttagatccctgttcctggagctactggttgtgagtcaccgtgtgtgtgtattgagaactgaaccctgaccctgtgcaagaagtgccctcaacaggtgagccaccatctctccagcctgctttctatgagaaagtttggactctgaggacttgctgtcacaccgcactttcccttgtctttctttattaataaccataatgcaaacatgttgctttgaaaaacagctgggaaagcacactttggaagaatgtgcctggggacatggtctgtgagcatggcgtctgctgccagccagcatcctgtaccttgctgtggtctgactcttcacaggggttcctttatgtcatcgggagtgggggcttgcttctagaactcaggaggtagcaaagaggtggagtgtctgcggagaccaggagcgaggctgtagactagacaggggcaggggtggagttctggtgagcacaaaggcttcacttttatccaagaagactttgtgatttctgaaaacatgcaccgagcatttatttcatcactagaaggctactgaaacggatactgcacgcctttagccatagaccctctagaggattagaagaggtcagctgattagaatactacaaatcccaggttccctgggaggatggccacttctgagaggaagtggttcagccaggcaaacccccagggctgcagccaattgagaaagaaaatgaagggaagtttttgaaagaaatgccgggctcatgtctggggtctgtctccctctctcactcctacttggcctcctgtctaattgttacagcctgtctgagctggcaaattccaaagcacatagtcaatttacacgtagcttaaaagctctagaggaaaacacatttgcagtgagaacattcacttgcctacaattgctaggttaaccttctgggctttcacccagttaactcgtgtgttttcttagttgggagagagagagaacttggggagattaaatgagtgtgaatataatcccagggaccctgcgttcaaattttgaccctttcacgtagtaggcaaattatcaatacctactgactagggtatcatctcctgccagtgatcctgtctatacacacacatcaaagaaacgacctggaagtccattgcaaaatgctgcacaggatgtgtgtgtatagacagtgtcacctgctagatttctcaggggacaatattaaaactgtaatagctaggagccgctctgtccaggcacttaatgaagattttttttttatttgtggtcaagaaggtgtttttttttttgttttgttttgtgttttgtttttttgttttttgttgtttttgtttttcaaatgagtgaaaagtaggagtagattgagttttccagagggtatttatatgtctgccatcgccagcctcactttgccgtgtgggtgcttgtccttcactggctctgtatggtcacctcaagtcagtagagcatgcaagaagctttagggctgcaaataaaagagaatggcctaacgtgaggctgaaagggaactttgtcagaagtattggctagattgttaaattggctaagaaatagaagttggcagctgcaattccctgccttgataagcttgtgcccaacattctcacagacctacatttcctccgaggcttcacgggaggtgggcataccgctctcttgtttgccactgtggtgacactggttcgcagcaactggtcacttgtaaatgtggagtgaagcagaagaaagcgtccacagtcagcaagactgagttgtgaatccagctgtccctccctgagttatgaattcttgtctctgaggttcacttcctcatgggtaaagctaggactgttgtagtatcatccagggatatcaaagaagtaacgtaagatcaggtaatgaagtgcttgctatctgttttaaaaaaaaatacggaacttcaaaatattatatggatgtcttagtcgattgatacttcctttttacatggctctggtccccctgatataatacagagttaaattaggagctgagaagatggctcaatggataaagtgcttgttgctcaaacattagaacccgcatcctaaccccaagctcacacttaggaagcctagcttgatatctgcatgagtaactgagctgagtcaggcaggtccctgaagttctctggccaatcagggtgctccaagctcagtgtagagatctggcctcaaaaaaaaaaaaaaaaaaaaaaactatactgtaagagaggaagagaggaaaacatgacatcaacagggagagagagagagaaagagagagagagagagagagagagagagagagagagagagagagagaaatgcgctactttattgtacataactatttttagatttcaatcacttgggacaggagagagatgcttggtaggtaagagacttgtcagggtaagaggacctgagttgaaatcttagttccatacacatctttaatcaacattgtgtggtaggaagtagagggagacaagagtttgtatccctgtgccttgccagttgtgagtctagttccaagttcaataaaagaccttgtctcaatggagtacgatgaagggcaatagaacagaacacctgaaaccattctctagccctgaggatgtgtgcactagcctgcttctgcacatacaaggttgcatacaccacattcactccgatgcatacacagtcacacacacaaagacaaaaattataaagccttgagatcatcacaaacttacaaaacagctggaaaaatataagtgagcgtcttttcttgggctgtttgagaggagactcctgacaaatgctccattaactctggatacctgagtgtatatttctgtcaaacatcggtcttctcctaaggagtccaccacaagtcagagaaccagaaaattaacctgcataggttacttccctgacactctctggcaccaatcacttttctttctgcatggatatttttttccaactctgggaacttaaccaaccctgtcatatactgctctactctttattttaaggcaagacttcactaaattgcccagcctctccttaaactccctttgtagccaaagtaatccttatgatcctcctgcctcagtttccatagtaatgcaaattagcagctttgtgccaccaagccagcccattatcatgtgttgtaggagaagaaagcaccacccagaatcatttggaatgcccagacttcccctgactttcagaatcttgggaattttagaaccccttgggctggccacattgtagaataactcccagggttaggtgctcgggtgtgtgttcatggttagggctgccttccctgtgagcagcaatcatagaagtcctcccaggttcctcccctggcagcctatgtggaggtacatgccctcaatgtatctcgatatgagggggttcacttagatggatggttgtggaagagatgatgtttttcaggttcttctaaaaatttacatttttccttttgtaattagcattttgtgcagtgttcctcatggaattatggaaatatcccccactattaaattctagtgcatgtgtgtgtgtgtgtaagtataataagtgttcctaaaggtacatctctaattagtcctgctttccaattttattgagagacttgaatttgttcttctcattagtttgatgatgattttggcccaataggaaaccatttaagtgggtttcaactttagcttacgcatgctaacttccttacttgttccttcaaaaacacatttagggctccagtccctaattcagggattcctgcatcattttagtgagaaatgatttttcaaagccaatatctgtgtgctaggtgtgcccattgttagtggtcttatctctaagatttcccagaggatagcactaagcattatatgcatacataataatatgcatatactatgtgtttatatacatttccatatgttcatgtatacacattcataagctaatatgtactcactccatattcatctcaatctatattgaaaatcctgagttcattcagatgtgtccatttccaaccagggagcgcaggattcctctacttcttcctttccatattgtaatgaaaaccatgttttttgtttagacatacagagtatccttccttaccaggccctgccaaaaaccagtttttcctctctggactgtccgcacccacacgtgacaggctccttcccttgcttaggccaaccccatggcccttcccttcacacagtgtatgccctcttcagttgttcaaacataacaccacatgccatcttccctctccacaaggacacagtctccagcctgtggctgtactctgactcccatacacaacacactaccacagcttgccttgccctgctgagcactactgctcacatcgggccaacccagtgccactgcacctacagcttcaggaggtgaagagattgtcgaggcgggatagatgtattaacctgtggcttttatctgactctgtctacacgtacacatatgcacccatgcatgtgggtactttctgagctagaaaatattagaaatggggagaacaataattataaattggcacccttctaatgatcttatgttccattatgatattttttttctaaatgac

SEQ ID NO: 194 - DNA, 1729 bp, Mus musculus
aaagtgaagtcacttcccaaaattagctgaaaaaaagtttcatccggttaactgtctctttttcgatccgctacaacaacaaacgtgcacaggggagcgagggcagggcgctcgcagggggcactcagagagggcccagggcgccaaagaggccgcgccgggctaatctgaaggggctacgaggtcaggctgtaaccgggtcaatgtgtggaatattggggggctcggctgcagacttggccaaatggacgggactattaaggaggctctgtctgtggtgagtgacgatcagtccctttttgattcagcatacggagcggcagcccatctccccaaggcagatatgactgcttcggggagtcctgactacgggcagccccacaaaatcaaccccctgccaccgcagcaggagtggatcaaccagccagtgagagtcaatgtcaagcgggagtatgaccacatgaatggatccagggagtctccggtggactgcagtgtcagcaaatgtaacaagctggtgggcggaggcgaagccaaccccatgaactataatagctacatggatgagaagaacggcccccctcctcccaacatgaccaccaacgaacggagagtcattgtgcctgcagaccccacactgtggacacaggagcacgttcgacagtggctggagtgggctataaaggaatacggattgatggagattgacacttccttcttccagaacatggatggcaaggaattgtgtaaaatgaacaaggaggacttcctccgagccacctccgcctacaacacagaagtgctgttgtcgcacctcagttacctcagggaaagttcactgctggcctataacacaacctcccatacagaccagtcctcacgactgaatgtcaaggaagacccttcttatgactctgtcaggagaggagcatggaacaataatatgaactctggcctcaacaaaagtcctctccttggaggatcacagaccatgggcaagaacactgagcagcggccccagccagatccttatcagatcctggggccaaccagcagccgcctagcaaaccctgggagtgggcagatccagctgtggcagtttctcctggaactactgtccgacagcgccaacgccagctgtatcacctgggaggggaccaacggggagttcaaaatgacggaccctgatgaggtggccaggcgctggggagagcggaagagcaagcccaacatgaattatgacaagctgagccgggccctccgatactactatgacaaaaacattatgaccaaagtgcatggcaaaaggtatgcctacaagtttgacttccatggcattgcccaggccctgcagccacatccaacagagacatccatgtacaagtatccctctgatatctcctacatgccttcctaccatgcccatcaacagaaggtgaactttgtcccgtctcacccatcctccatgcctgtcacctcctccagcttctttggagcagcatcacaatactggacctcccccactgctgggatctatccaaaccccagtgtcccccgccatcctaacacccacgtgccttcacacttaggcagctactactagaactaacaccagttggccttctggctgaagttccagctctcactttactggatactctggactctaaaaggcacagtagccttgaagagataagaaaactggatgttctttcttttggatagaacc

SEQ ID NO: 195 - DNA, 1359 bp, Mus musculus
atggacgggactattaaggaggctctgtctgtggtgagtgacgatcagtccctttttgattcagcatacggagcggcagcccatctccccaaggcagatatgactgcttcggggagtcctgactacgggcagccccacaaaatcaaccccctgccaccgcagcaggagtggatcaaccagccagtgagagtcaatgtcaagcgggagtatgaccacatgaatggatccagggagtctccggtggactgcagtgtcagcaaatgtaacaagctggtgggcggaggcgaagccaaccccatgaactataatagctacatggatgagaagaacggcccccctcctcccaacatgaccaccaacgaacggagagtcattgtgcctgcagaccccacactgtggacacaggagcacgttcgacagtggctggagtgggctataaaggaatacggattgatggagattgacacttccttcttccagaacatggatggcaaggaattgtgtaaaatgaacaaggaggacttcctccgagccacctccgcctacaacacagaagtgctgttgtcgcacctcagttacctcagggaaagttcactgctggcctataacacaacctcccatacagaccagtcctcacgactgaatgtcaaggaagacccttcttatgactctgtcaggagaggagcatggaacaataatatgaactctggcctcaacaaaagtcctctccttggaggatcacagaccatgggcaagaacactgagcagcggccccagccagatccttatcagatcctggggccaaccagcagccgcctagcaaaccctgggagtgggcagatccagctgtggcagtttctcctggaactactgtccgacagcgccaacgccagctgtatcacctgggaggggaccaacggggagttcaaaatgacggaccctgatgaggtggccaggcgctggggagagcggaagagcaagcccaacatgaattatgacaagctgagccgggccctccgatactactatgacaaaaacattatgaccaaagtgcatggcaaaaggtatgcctacaagtttgacttccatggcattgcccaggccctgcagccacatccaacagagacatccatgtacaagtatccctctgatatctcctacatgccttcctaccatgcccatcaacagaaggtgaactttgtcccgtctcacccatcctccatgcctgtcacctcctccagcttctttggagcagcatcacaatactggacctcccccactgctgggatctatccaaaccccagtgtcccccgccatcctaacacccacgtgccttcacacttaggcagctactactag

SEQ ID NO: 196 - DNA, 73725 bp, Homo sapiens
tacagggtacagtcctgggaggacgcagagatcctcttctctgtgctcacttaggctatacccttcatttgtaaaacaccattaaataaagtactttcgtctgcaaataattgcaattgcatcttctaggaattctttctctgggtcatccactgctgagccccctccccaggaagtggaattgtaagtgaaaggggaaaggcacttgggagggggaatgatgttcaacaagactccttgaaaagtcagccggggtccaggcacggtggctcacacctgtaatcccagcactttgggaggccgaggcaggtgggtcacctgaggtcaggagtttgagaccagcctgaccaacatggtgaaaccctgtctctactaattagatgggcgtggtggtgggcgcctgtaatcccagctactcaggaggctgaggcaggagaattacttgaccctgggaggcagaggttgcggtaagctgagatcgcgcctctgcactccagcctgggcgacaagagtgaaactctgtctcaaaaaaaaaaagaaagaaagaaaagaaaagtcagccggacactctgaagctctgtggcagatttggctgtgtgctacggcctaaaattggagacggcaaagtggaaacggtttaggggaggagtagaagctttgcagtcaggccagcagcatggagactcatgaggtgaggggccagaggcaagtagcaaacctctttaagcctcaattttcttttcaataatatgaggatcctaactcatattttaaaaggttaaatgaggtgatgatagtaaaagttccttggaaacttcaagtcatcaaataatacatgttctatttgatcgttctcatttaaaaatgtggtccttgtttggtttttgtctgttgtttattttgtttttgtcgtttggagataattccactatgtgtctatcagaggacttagactttaattctgagatcgattcccccctcactgtgtgaacctagaagggttatgctttgtgcctcagtttccccacctggacagtcatggtgctgattcctgccagccagtgtcaataaccacagtgaaaggatactcagacagtcacctctacagcctttgaatatgggttttcggttgctgagtaaaatgctcggagacgttccggttactatggctacataagaaattaccccgaaacctagtggcataaaccaattattaggctcatgagttttgttatccttcactgaaggctcgttcactctcaagtctggaggttgacgctgtggttggctgtggcctcggttcctctcctgcgggcctctccatacggttgctcagcttgggctaatctgagcttcctcacagcatggtggcgatttccacggactagaggcccaagagagaacaagaagcaggtggaagtcataatacctttatcactttgtcccggaagtcacgcaaggccatttcttgaggcaatcataaagttccatctgagttcaagggggaagaaaataagctctgccttttgatgggaagagagaggcaaagataagaaatattctgatggtcattttgagaaaatgcgactgtgcctcatgcaaaggagttttcagttaatgcttgatgactgactaatgtttcccaccttcttccttatccaactttccataaaatttacctcctcttcccttttccctccctgccctttacgcagtggaaatgaggagcaagaaatgcgcacatgtagagaggagagagaagcaaaaggcttagccttgctaacagcggccacctgctcttggcacttcagatgagacttggagtgaccccaacccaggctgatcacccccactgctgcagagcctgctggtttcccaaagcagagaacacagagggctttgcacctaagtatcttgttcgcatttcatattctctccgactggcaagagaagggacttcgtgtcattatgcaaataatgtaataaaaagccaaaactagcgtgctccctgtggtgaccctgggtaatggatatgccagagattagccttccagagccctgtactgggagcggcggagtgggcccactgagcagggcagccacagggaacttggtctggttgcttttgacattcctttcaccagacacctccagccaagctggtcagccccagacaactgtccttaggagattcagggcagaacagagggaaaggaatgggaaggacacaatgggacattggtgcttctcaggccccatgtcttgggtcattctgtgttagaaataaagctcagcctacgtataaggaagaacagagggaaagggtctcccactcatgtccacttctggcatttttcctcctctaactccactggactcataactgtgaaatatttgttccttcccacacacaggataatggcagaaatttctgttatgtcttcccgagtgaaatggggagatactcaaaccaccctcttcttctttccttgcccctctggaggcttttccatctcggccttagctagactgtttgaagatgcaatggtttgctcatcgttcatatcggccaggccactgtgcggccatgctctgatcacatcccatcactcaactcatgtgcacatgaaaagtaacatttgacttaatctaaggaaaacaaatgttggaagacacatttgtaagtataacaagaaaagatgcatataggcacacatatgtgacaaattccaaaataagtgaaatttttaaattcgtgaatgcacagatgtacccacgccattcttctgatattcactgagtatgtggtgtacgaacaacagtataaataggtgctagccacctaccattttcattatctcacaacagatgcctcctctcctcattcacagggctattcaggctatgtaacagagccttatctatggcacctagaggcctggactcagaaaccagagacaggcagaggactgagcctgcaatggaatgacacccatggttttaaaggaagagtggacacgcagattagtgaaatcggctctgtactctaggagcccatgggatttgcatttcaggctctatcatcaccaaatctacttattagtagtttaggcaactaatcttttaaacaatcaacattcggagaagtaggtatcgctctggctttatctgaactccctcttgacccatctccaacccaatggttctcacgccatttctcagcattggccttcattaaaattttttttaacttttttttttttttgagacactgtcttactctgttgcccaggatggatggtatgatcatggctcactgcagcctccacctcctgggctcaggtgatcctctcacctcagttttccaagtagctaggaccacagacacaccaccacaccttttttttattttttatttttatttatttatttttttgagacggagtctcgctctgtcgcccaggctgaagtgcagtggtgtgatctcggctcactgcaagctctgcctcccgggttcacgccattctcccacctcagcctcccaagtagctgggactacaggcacccgccaccacgcctggttaattttttgtatttttttagtagagacagggtttcaccatgttagccaggatggtcttgatctcttgacctcgtgatccacccacctcagcctcccaaagtgctgggattacaggcgtggtttttttattttggttttgtttttttttttttgtagagaaagagttatgccacgttacctaggctggtcttgaatgcctgggctcaagcattccacccggttcagcctccaaaagtgctgggattatgggcatgagccattgtgcccagctttttaaacaatttttttcttttttttctttggagacagaggctcactctattgcccaagccagagtgctgtgccgctacatcggctcacagcaagctccgcctcctgggttcaatcgattctcctgcctcagcctcctgagtagctgggattataggcacccaccaccacacctggctgagttttgtatttttagtagaaacagggtttcattatgttggccaggctgttctcaacctcctggcctcagatgatcttcccgcctcagccttccaaaatgctgggattacaggcatgagccaccatgcctggccacatttttaagtatttactttgtcccaagaacttcaggtgcttgatttaggtactttactcatattatctcattttatctttatccagaattaccagatcaggtactgatattatccccaacctacagatgaggaaatgaagttcttggaaattgtactagatgcgtaatgagcagcagatgaagcttggatagaaactcaaatctctctgactcaagatttatgctctaagttacaataaacaccggagttacacttaaagagcttatggtctaattgagaggacagaaaattcacaagaaagaacctgtgaagagtagtggttatgtgcttaggctgtagacctgaatttggatcccacatcacactaactttctgtgtgcctgagcaagttatttcacttttctgaatttccattttctcatctgaaaaaatagaatacatccctcatagaattgccaggaggattaaattaggttactcatgtaaacagtgttttgtatttaataagtgctgtgattattaccacttttatctgttttctgtaacgacgacagagggtgtattatatcatgtactaaaggcaccttgcccaaactggaggagaaaaagtatcccaccggttcaagtgcattactggtagcaggccccagctggatccaggaccaggagggggtcgtggaaagcaagcatttctatcggcaaatgtgagtgatctgctgtagctcagatgccaccccaagcagcttgccttgccagaggtctctggtaaaggggcatcattgggtacaaatgtgctggggcacttccctgcctggaacaagggaccctatgccaccctctggatctaggactcagtggctctggacccacagacccagcctttccagcattctgcaaaggaaagtgcttctcagaagccaatgactaagccagcccaggggttccttttacagagacaattgttgggtcaagaaggaaccccagagctgagccccacatagggctaggagcccacgcctcctgtctttctcacttggaagtcaattttacatagcatggtctaaagcctcatggaccccacaagtcttttaaataataactaacttctcttcccttgaataaaataatcagcaacaataggagaagcaaagtcatgagaaacggaaggaatgtagtccctctgaggatggctggtgaatttgcatgctggtgttcttcctacacccagcctatcacctcagttaagtacttattgatgatttatccgtggaaagttcttgaacgctagcaacatgctcatttctgtaaagagcttgaagtacaaggaagagttttaagtttaaactttaaaaagttttaagagtttaagtaaagagctttataagacacacatgaagtagcaacagctcctcatgtgtaacaagctgcaaataagtgaaatttctgccagctcagcagctcctcgcctgcagacagcagcagccacatcaagttgcccagactcattcctcttgtttgcctcctccgtccctactctggtcttcccagagcaatttggagagggctccctactaccagtggcatcataaaaatgacagtgtacttgccaagggcatggtcttggggtgctcctaaagctgttgaactgcaaaaaggggtgccgtttatttgcagaagccacaagaatgctctcctccccaactctgctctttcacttgggtctcaaatcagcttgtctggggccttatctccccaaatcttttattccacttaggggccctcacctcccttcccttgcccatattggcttttcaaattcagcccagtgagccagacagggaactcttctccttcgtcttctctctcttcacagcccccatgatctatctcttcttttctctacattgtaatggaaaaaaagctttttgtctagccatgattgcaaatagaagggggatgtgtgtgtgtgtgtgtgtgtgtgtgtgtgtgtgtgtgtgcacatatgcatacccaaagcagtattctcacgagctgttaacagctcaaaggagtcataggtcatcatcagaaaggtttcatggaaacaggaagctctcaggaagatctcacttaccttacacaatggcaaagataattgtgcatcagggtgaaagagtaaagaaaggttacttgcagcaaaaggaaccacaaaattaaggcacagaagcatacctgagtagggcttgtctagtggagcagtgagaatagttagaattggacacaagttgcagcaagaggaagttgtgcaatgtaagtgtggcaggtgggacaaagatgacctttggaagacaagtggctgagaagagatttgctgtggtccacctctagggagctctctgaggtttttgagcagattgtggcaggatgacagcagtattcacaacttgcaagggagctggatccagccagggagcgcacaaggtgtactgaatgagggaagagcatgtcagtgggtcgtcagggagggaagagtctcagagagaaatgcccagactggacagaagtgtgaggcattcccggtgaaccgggacgctctcctcctacaatgttgccacttgattggagtttccttgattgtgaactacattcttaaggaaacttctattccaaaatgagttcaaactggttttgtgccctttctacacctacactctatctcatcacttgtttttttctagctgtgtaccactcacttccttaagaagtctctcctgggtctgcctccagaaccgctggctttgtgttctctgtgtattctctttgctgtgagtcttgattttgccgtctgcatgtccccttggtcaggacaatcctgtgttccctgttgcctggtccaccctccttaggataatgatgggaggaactttttgcccatctatggagcatcactgtgcccagccctgcctcccgggcttctttgcctctgatattctgtcatcttctcccccaacctagaagagggaagggaaagaaattattttactggaaactccaaggttcatgaatgataaactaagaacgtaagccattctctacagcagaagatgctacctgattcctgaaatgtcatctgtttttgtagcaggactgtggtacatgttcttcactcttatcaccaaaagacacttaggggtcataggtggtaatgtgtcctctgcttccagtgcggagctcaaggaatttcatggagtcagggacagctgtctgaaaggttgcaatgtcacccttttcagctcagaaccataattccttgagcccagataacagttcaaaatttaggatatgaagccaaagctgaactctagctgaaatcaagagtggatataataaccaagaaacaaatggttctgacaagcacagctttactctgagcatgactcaagggcatctggtagaaaatgaagaaggatcccagcagatgttagggctagggagatcccctcggttgggggatgtaagtgttttaatattgtgtgggcaactctgctttgaatgtatgtctggaggcacctacaccatccaaagccttctggtgcaaaagcaggactcctagagtatattccagtattttttccctgatcccagctgaaaacagccatagaagagcctccctttttgaattatggctgtctgtccgctggggtggagaatggccctgggagacaagagacagcccatggagcaggttgtaattctacaggcatatgaagagcattcattctgaagaagacattcaattcaggaatgtgaattacacaaggaaggtagacaaatcccagctttaacaagtgctgttcacctatcactacattttcaagtaaaggtggtgtatccatttgctagggtttccataacaacataccagggctgagtggcttaagcaaaagaaatttatttgctcagagttctggagactggaagtccaagatcagggtgccagcagggttggttttcctcagaggcctctctccttggcttgccaatgactgctgtgtcctcacatggcagcccctctgtgcacacactcccctgggggctctctgtgtgtccaaattccctcttcttataagaacaccagtcatattggattagaacccaccctatcagcctcatttcaccttacctccttaaaggtcctatctccaaatacaatcacattctgagtactgcgggtaagggcttcagcatatgaattttgtgaggacacaaggcagcccctaacaggtggcctaagagaatctttgtttgaatgctaataatcatgatacctaacatgttctgagtgtgactcactatgtgccagagacttctaagtactttgcatgtattatcacaactattatcacaattatagattatataattattgattatatagattatagatcaattatagatgactaccatcttctctgaagacttactttggtgtaattatgtgactgtagtgaacactatgccctggtccctgaccttggatgcctgtgattcgatgagacatggaataatgggagactcttaccctcatgttttgattggtagcagatctccggaatgtgcaaagttttttagttgtcgttgttgttgttgtttcgagactgtcgcccaggctgaatgcaatggcacgatcacggctcactgcagcctctacttccggggctcaagtgatcctcccacctcagcctcccaagtagctgggcacatgccaccatatctagctaattttttctttctttctttctttctttctttctttctttctttctttctttctttctttctttctttctctctttctgtttttgtagaaacacagttttgccacattgcccaggctagtttagaactcctggactcaatagattctcccacctcaggctcccaaaatgctgggattacaggcatgagccaccatgcctggccaaggcttcttttcttaatccatgatctcccaaagtcacacccaagtcagtgatgggataatatgagtgggaggacccaacaacctcttttggagggtcttgccctgactggcacttcacgtgtctgaggttcctctttcgtcctttggctggctgagtcatcaacattgagatctacaggatgcaccagcacctcctagagggccctcagcaaaccactgagcatttcttacaagctacacccccacaccagatcttctcatttaatccacctatcgactctgtgctaaaactatttttatccctgttacaaataaggaaactgaaattggcctggccacagccatgggcaccacccttcccttgtgtgaccttgagcagcacacctagcctctctgggtggatctcactggccttgcctggaaaataaatgctggatctcatctccccttcattgctgatgactccactcagctcgtaagaggcatttctgcttatgcctggaaaaatctagcattcacacaccaccacaatactatattccatgccaagtcaccactattcttggcctccctatccccaccctcctttttgggggtcccagactacagaaccaataaacaaacccactttcatgattcctccatccccactccactgcccaaagtccctcctcacccaggtaacctgcaaacacccatctggtttgcataagggcaaacctgccccctggagtgtgagtcaaacaggaacttccagacaagctgtcctggggcagccctgggccaccttgccagctcaaagcaagagtgtcacttgcttgggtgaagagtgacactgggctttctgtctcttctctggccctgcaggaggctctgtcggtggtgagcgacgaccagtccctctttgactcagcgtacggagcggcagcccatctccccaaggccgacatgactgcctcggggagtcctgactacgggcagccccacaagatcaaccccctcccaccacagcaggagtggatcaatcagccagtgagggtcaacgtcaagcgggagtatgaccacatgaatggatccaggtaagctcaccaggcctgtgcaggattgggggaaggcacaaagtcgccagatctgcagcaagtggcttctggcacttaaggtttttgcagcagatggggctctagagctgggccaggaagcctgtgtcagtccctagagagctaaggcagagagggccacagactgatgatggggtggagtagggctaggaagcccccctggctctctggggcccacgaagccctcagaggccaggtaggagtcaggccccaagcgcctatgcagacactcgtggaacacttatttcttgttaatcccaggcccaggtccagtcctgttggggacagcttagcaataagctactcttccctgtcctgttgaagatacttaacccctctgggcaggtctcagcagagcaaaggtgaccaaaccattctttagtaagagtggagaagggatgaggaaggtgtctaccttcctgtgggggctcactgtgtctgggagggggcaggcacctggaaggcgtgcatgaagtgggtacaatactgggtcagttcgggctttgcttgtagaaatggagacaggagggtccagggagagaaaatcacagggtcatggaagaggacagtggacaggcggcctcagttttgcgtcctgcctctgccccttgggcaagtcatcgaaacccctcagagcaccagctttctcccttctcaaacaggactgggatattcacttccttatggtccttactctagcgttactctgatgcctcagggaaaggacctgggatggtgcctgagacgcgttaggaaagtgctctatagtgacagtgattgttatgagcaaagacttgaaagacagagaacatcagtcttattcacaaaatatcagataatctactgggccaaaggcacaaagagatgaaaataaaaagcaacagagggccctgaatggcaggctgaaaacatgtgccatttattccacagccagaggctgactttgagcaccgatgtgacatttaacccagaggctgactttgagcacagacgtgacatttaacctcatcagagcagtgacttaagactagcgagctgacagtccttgcgcacagacggtaggatgggagagtcagaaagacaagtgaagaagttagtaaaatatcccagataggaaataatgaagttctgaactaagtgatgatagtgattttggaaagtgaaaaggacagatacataagggcgatagcaaagagatgattaacagggcttaggtgagtaaagtgtgaatgaagggggtgcatgacaggaaagaatcaaaggcgactaaagcctgcacattttaaaggctggtgctgtgagcagccgcagaaaggtggcacaggaaatgctttaggatgggatgtcagtgttctctttgagattccttgtgagcaatgggtagaacatccagataaaaatgtctactaggctttgggaactgaagctcagataatctttcaggcctggaatttacgtttgggcatcatctctaaggagtctgaactgtgaaagtggatgaggtcaccgaggaaactagtctagattgaagagagagaagggaatgagcatggttgggagggagaactcctccagagcagctcatggcctcagacctgcctgtgggaactcccaggcctaccacatttcaaccctactaaccaaaaccagtgactgggatctcagccacctttccagatcccaggatttcaggaaggctcagaggttctgagcctgcagcccctcagatgaatctctctccagatgtaattctgatggtgccggagctcctaacagtcgaaggacatggtgtgttgaacgttttcccatattatcttaccacttgttcctcaccactatactaagaagtagttactgtaacttcactgttacacaggaaggcaagcagggctttcaggggacagtgctttgtctaaggatttaaaggaggcaaagttggagcccgaacccaggcgtttggttccagccccacgtgccatctgttaggcacctttctgctccctctgcttgtgtgtcatgcttttgcaccaccacctcattcctgccaatgcccacctggtgaggaggcctattctacgatgcctcctaaatggggcccttctccaaggagctcccaatgcttgttgaagatccagatcccactggtggagattccttttttttttttttttttttttgagatggagtctcactctgttgcccaggctggagtgcagtggtacagtcttggctcactacaacctctgcctcccaggttcaagcaattctcttgcctcagcctcctgagtatctgggattacaagcacatggcaccacacctggcaagtttttgtatttttagtagagacggggttttactatgttggcccggctggtcttcaactcctgacctcatgatccgcctgcctcggcctcccaaagtgctgggattacaggcgtgagccaccgcacccagctttgttggagattctctggcctgttgtaacctgaatctgcctactccttacctccactgcccctgcctggtgcaagccagcagcacctctcctaggcttctgcgggggcatcctgctctccccacttcctcctgccttcctgaagtctattctccggacagcaagcagccagagccatgctttcctcgtttgtaatcctcttgctcaaaactcttcaatggcttatgacaaaatgcaaagcccttagtgtggccccaccatccctctgacatcctctctactgccccctccctcccacttcttccctccgcgccagcctcataagactctagctgctgctcctagacccccaggcaccctcgtgcctcagaatctcttcccctgagctccttcattctggaacattcctactccatctagtcatatgactctctccctcacgagttttgggtttctctacctgaacctcaccttttcagaggcctcccctggccacctgatcgaaaccagcgcctcctcactctttaccctgcttagagtgtctgtcctagttcttatcacctccctcactgacacgtgggcagggcctgaaacggtaggtgctcaataaattgtcgtcaaataaataactgagaacacatggctgagcagactcaaaagagaaggtgcttgtttaaagttaggacgcagatccaggtctgctgactcagccccttcaatgctgagcctgagttgatgcatgggcttctgagttccatcttcatgctcaatggagacccatgggtatttgtgtctctggtgggaaggaagtatgctgctcaccactccctcccctgctctcagagaatcctcaagcacttcaggatactgatcctgtgcaaagagggtcccccaaggaaattgatttttcagaacccacttgccagctcatacctggctccagtcacaccaaaagccagctggagagggcctgtgtgaatattccagtgaacagacaggatatttacctggctttggctacacagagcagcaacctctgcttttgagttgcttgtcttgacccataccatcagcgggtaacaaagtaggttcagaaagactgatatcttctcacccaccctgggcaagcagagacaatcctgtggactctcagagccaagcagcttaggcacagctatcgccagcaccccacaaatattccctaagggctcacatgtaagctggactagtggctagcaggaagcaaggagttttagaaaaatgtcattgcttacagtggaaccatgtcagaccctatcatttaattatgccaaaagcaatgacagaatgaaataaatgccaggctctttaaatctctcatcctgaacactgtgcttctcctatcctctgagtattattgataatgacagttcgttacttgcacatgatttgattgtttgcagtggtctaattcgccataacacaaaaagataggagaggatgttataatgattctgaacttcagatgagaaaaccaaggcagggtataaaatttgagactgcttggctcatgggctagacctgtgctgttcaatgcagcagccactagccacaggttgctactgagcacttgaaatacggttagttgaaaattgaaatgtgctctaaatataaaccacatactggatttagaagacttactatggaaaaagtgtaaaatatctcattgattatttattatgctgaaatgatcttcttttggctatattgagttaacatattaatatactttaatatattattaaaattcatttcatcgttttgttttcttttaaaaatctggctactagtaaatttaaaattatgtagctcggccaggtgtggtggctcatgcctgtaatcccagcactttgggaggccaaggcggcggatcacctgaggtcgggagttcgagaccagcctggccaacatggtgaaaccctgtctctgctgaaaatacaaaattagcctggcatggtggcgcatgcctgtaatcccacctactcaggaggctgaggcaggagaattgcttgaatctgggagacggaggttgctgtgagccgagatcatgccactggactccggtctgggcaacaaaagtgaaacaccatctcaaaaaaaaaaaaaattatgtagttcgcacatgtggttcccattctacttctattggacagtgctgggccatggtggtctggactgttctgtgattcacagtgcattttttctgcattccttgacagcatgggcttctgagttatgtcttcatgctcactggagacccattggcatttgtgtctctggtgggaaggaggtgtgcggtgcacctgaagctaccatgcccacttgcttttcaccccagtagcaaaccctctggcccaggggcaaagggtcaagtgcagagactgaggtctgaggatctcagagacagagtggcttgcccatgttgagggagttttgtgctctctttcttcatatcttcctgttgtggttgactctgttaggctgggttgccttgaaacagcatggcccataggttctgtgtcgcatgtagacttcagcaacttgatccaaactgtggtctgcaaataactctcagctgcatcctgtctcaaccacagggataggggaaaacatcccatgaagaaaagaatatcaggttatagagggaaatgcaagacttgccttgtgagcctggtattcaggaccagagttcagagctaaccttccttgaaattccctggcctggcccccagggtctggatgccctggacacctagggactcacattccacacagagaaggatcagctcctgttccctggaacttgtgcctctctggctgcgaggcccctttctaaactcttgtgttctcaaccttgcagtatgagacatgtcacacataacctgggtggggaggatacacaggatcctggaaaagttagcagcatctactgtgtatggggatgaaaacagctagtggattagggcggtggctttatcataagtgatgctttttcttttcttggaatttgcttttaagttattgcatctccttttcaaaaacaaaaaagtcacatctatgtcctacagacttcctaaaggcaatacagattgtttaatttttgcacagggtgcatactacgcaggagttacacgccgcgggtcctaatgcagccatgtgacttaggcagcccgcgaggcctcactttggccacgtgaacatcaggtatcctttgacagtgagcctgggctcagatgtgcgggtctgatgatatacccaagttcagttgctctgagttgactaggaaggtagagaagatctttgtacagcctaaagaggtaatcttcaggagaagtctttgaaatctcccttcatccaaacacccaagatcttacaccttgttttaaatggcctaacacattgcaaagctttttttggaaaccagtagcaatgttcacagaacacacacaaacagaactcgaggagtcaagagctatgtccagtggtggaaatgaaggacaagggctaccctaccctcggcagctctgctgtggcctctgtcgccctgagatggagatgtgctgagttattacacccttggggccaccgccacctccctgctctattgtggcagccccaggctctcttgtcacctgtcccagtgctatcagctgccagtgggccccagccccatgctagctgtaagtgcaggtcttaatacaaattagcagcagtgcaggcaagctgaatggcaaaacctcgtcccgcactccccctccctcttgttttcatcaagccttcttcacaggcgccagctgcctcattaaagagcagccttttatgctgggcttcacctgtacccaccctgagcggcagccgtggagccccatggccgcacgcagggcttgcgctggctggaggaggcacggtgcttgggagctgcaagaatggagggaggactggcaggcgagcgggcgaggtatggctttccttctttctctccctgagcagtgggaggagggccagctgggcaagtgtggggaaccaggatggtgccagcccttctccctaaggacacccgcctgcaggtcctagtgcagaagcctgggaccgaggacagggccattttccagaggagaaacaccctggcgggcgagcggccaaaccgatcacctgtccagctggagagcaggtgtgtgcacagggccgggggagggagagaggaggagggaagcggaactgggagaacttctatgggtcagtgaatgaggaggttctgctcagggaatgagtggcagcggccaccccagcaagagagccccctcctcctctgcgtccactttcccttcgtctaggtgcccatggctcctctccttacaaggtcacgtgttaggcaggtttggggaaatgtttctttcagcttttcacatttattttcctccaaccctggcacctgggaccagccctgccacctgtgcctaccgtacatggccataaccataaaggctcactccatttcagtgagtcctgaggtgctgacttctctgcacagcaagaggtcagtttttaactcagaaatccccaggggcccggctgatgtggaaaagaatttttccaaatatcgtatccccaccgtccacaaacgggaggagcccggggagtgtgccctcctgtcccaccatcctgccccctgctgtagttctcctttccgagagacccctgcccataccctatgccctcttgctctgggggtcctccaagggaagagcgtgcagtgtggagcccacctctcccacagaggccgcctgccaatgaaaaccttgctcacttggttgcaggccaacttaatccttcaaacttctgcagcacttggactgtttcacaactgacaaggatgcagggaaaggctgccagaccatgtgcgtgagtgtgtgtgtatgcgcgcgtgtgtgtaatgtgtatgcgtgtgtgtgcactgtgtttgcatgtgtgtgcatgtgttgaatgtgtgtgcagatgaagtgtacgtgcatgtgtgtgcatgttctctgtgttgaaatgtgtgcttccatgtgggtgaagtatgtgtgttccatgttggaatgtgtacagtgcgtgtctgtgcatgtgtgttgaagtgtgtccatgcatgggagtaagcatatgtgtgcacgtgttctctgttgaagtatgtgcatgcatgtgggtaaagtattgtgcacatgtgttctgtgttggagtgtgtgtgcacatgtgcatgcatgtgtgtgagtgtgtgcctgcagttagccccagggcgggtgaggggacccagtgcactcgggccagagctcagctcagatgcaggcaccagggtctgactgggactgcttcatctcaggccaggtccttccgcagcagaagccaaagggccaaacgctggtgaaaagtcctgatgtgctactgcctcccctcccctcccctgccatggggacgttaaaccttcagcaatctggaactctgacggctggtttttggttctctgcctggaaaaacagtaggcgaatagtaaaaccttaaattctaacatgtgtgagttatacatcttattttcattttcagcccatgtttccctctgtaagacatcaggaaaaaattaccgtctgacttctaatatctcagtggagcatttatctcccagctatgataagtgatcttcaatatttttttcctttcagattaagaaacaaattcatttaattttctttattgaatgtgctcaggcctccccgccctgcctgggtctcaggaagccctgggctgatctcccttctcctgggttagtgactgccgtccctgcttgtgggatgggtgggtccctatctggtacggccctgctcctcaaggcctcgctgtggtccgttcctgcgcctggcaggggatggaggacagtggccaggcctttggaacgtccggagaggttatgcggcctagagttggaaggctgtaatctgaaccttatctgaactccttggtctgaaggcctggtttggagctcttgagagaactggctgtctcccaggctgccagaaccgatgcttcctgctcagtataatggcggctacagcttctccttggccttcccatcgtctcctttggtcctgctgctgctggagtggctgagcagcgggcactgggtgtgacagggtggcacctcccccaagtatgctggaggtgcgtgatgctgggctggagggcatgcagagtgtgtttgccagccagcttcagggcgccaggtggccatgggtgggacttcacccctccagacagctgcccatcaccagtgctgcaaaataccaggtgctgatcaagttctgtagttctaggctaagttggatgatctgctttctctcttgtgaatgtccatactgcttccacagtgagcttggggccagggatgcaaaatgccacagggccaccacctctccatcaggtggaagttcctggactccattccttctccaagtagcaaccagctcttttgcatgtgtgcttgatagtgaagcttaacacagaagacctgagtcctgtttccaccttgactagctgtgtgactgagccaggcagcccctgtctcgatttcattaaccatgaaaaggagatagtaacccttgctgtgcctatcctgggggcttattgggaaattcaaatacaacagtgcataagaaatgcattaaacttatatatgtgcaatagaaataactcactgagaaagcatttgctgctcacctcctgtaagaatactagggttaaacaaagaaagtgatgactatcctctcaagaactcagcagtcagggggcgcaggccaagctgagaatcagacagtgtgacaagtccttataaccaaggcgggcaccaagtgctgggggactgtggggaaggcgtgtctgggagcatggactaggttgcctggcagtgaggctaaaaatgtaagctgcagtcagacagggagggctgcgatgccacacaaagaagctcagaccttggtctgagggcactgaggcgctgccagcagtttttacgtactgtaattataggattgggctgggatttgaagaaaactctggtggcagcatggaggatagaaagagggcatcatcatcatcatgacaccaagtgtggccgggcaatggctccatgctcatcatcggagccctgggctcatgattcagaggctgaggcaagctgccctgtcagtgctgaccgcctctgggctttgtctcttctcactttagggagtctccggtggactgcagcgttagcaaatgcagcaagctggtgggcggaggcgagtccaaccccatgaactacaacagctatatggacgagaagaatggcccccctcctcccaacatgaccaccaacgagaggagagtcatcgtccccgcaggtaattcgagaaccaggctgcctgggcgccattcacttccccactctctggggggcagggagcatctaaacctttatctgatactctattccctgtggaattgcaaaatggagaaagctgcacgccagccgggagtggtggctcgcgcctgtaatcccagcactttgagaggccaagacgggtgaatcacttgtcaggagttcaagaccagcctagccaacgtggtgaaacctcatctctactaaaaaaaaaaaaaatacaaaaattagccaggtgtggtagtggacgcttatattcccagctactcagggggctgaagcaggagactcgctttaaccgggaaggcggaggttgcagggagccaagatcacaccactgcactccagcctgggtgatggaatgagactctgtctcaaaaaaaaaaaaaaaaaaaaagctgcacattttacctgacttcctagctgccctttaaggcagtatcccagatgtcacctgatgtgtgggtgctagaagccccacccttaaacagaccacatcacagactctacatcaatggcctggtcctcaaggacgggctgctcagagagcagaggcaaggccgcctccacccaaaaggaatcccgtgagctctggatgtgggcatccctgcctgtgaggaggaggtcagctgcagaggccagtccttccctccaggctcgtacttcccggcatctaccaggttccacctttccaaaattacagccagctctttcagttttaaaatagaaagaactatatttaactaatggagtgccttaacatgtgtgccacaagttatgtcattaggtaaaaatagcctctttttcctaggtgttggtgctgttggtcccagaaaataaaatcatcgttcagtccttcagtccattggctggacactccaccccagctagcaccagcaagctcagctgcctgcacaagaagggtgtttacaaactgccacgtgtagaactggtgccaggtagaaggggcaaggatgtccaaatcttaagcaaagtgattacagggcagggattaaacctgatcttaccaaaataactttaccagagaggcaaaactccttccatttgtaaaagcataaatgtagttgcctctgaagtcaaaaggttagacatctctttgaggcagtccgaaggcatctgcttgtaggtctaaaggcagaaatgttaagggctgcctcctgccttggcccgtggtgtttgttttccctgggaagctgcatctcaccatatccctggattacagctgcctccctgtgctctgggccaaattcaagaaggtgtgagcaagagtgaggcagcagacgggtggggcttgtagaaatttctctgtaccctttaggacttagaaatgactcctaaagcaattctaagtttgctcttccacaagcatctgacctaacaaaggaagaggaagaatcacttccatttattgagtgctttctaggtgccaggcaccacgtaaattgctttatctccatggcattacttaaaacacctgtcacaggagaccagctagtaatgtttagcccaggtgtatcgtctccctcctcactgaaagcagacaatgaaactgtattagaactgacaggtgggaatctctttgtacagcccaaagcaaagctgagcctcactgggtcttcactcaaatggtttcaaactcccctgcttcagtcaaacagctcccagcctgggagggaaagcttgcgggactgaagggtttggggatctgagattgtctttgaaccaacctttggcaccatctcattttggtcgtcattttggggaaggaatcttggaaatgggcagaagtggccagactgctatgtcgaccctccaaactttctttgatcagtgttgaaatgctttcaaaaggaatagcaaaacatcaggcttggctgagccaagttacctatagcgctggtggtgaaaataaaacaaattcatgtcaaatgattttcaaagcactttcaggctatggatttacttcattattttagctccggctagatcttttaggtcctcacacattttggcttcctccaggccaggctgtggatatgaggggaagtctcatttgggcaagtccacaaatcaaggcaataaaatattagtggaataaccgattgaatttatgatgggatttaaagacaagtataaatgtgggccctagttaatcactagctccatgttcagatgggaagaaactaggactaaatcatccaggaaatgcatttggaagagtttagcatgatccagagttgaagatttataattcattgtgctgtagagggagagtaataatattgttgcagagcccaaagcaagggaggaaataataaaataaataaaatatatggtgtaaaattgaatttgaggccttggatactaaaagtgaggaactgggagaagtgaagaatgaaataatatgctacataatccaactctcccgaggatatgtttctctagaattctgaaaaggtgcaaaattatttccatttgccaatgatccatgcctaattgcttctggagagtaaaagagcaagaaatgtatctgagagagagagaggaagacatacttgtacaatgacactttagaggagctccgctttctggcttcagagcagtgtaactcacaggtgaggtaaagcaggatggtgagaagaggaaaggggctttgggggaacccacctcttcagcttagtgaagtcctataatggtttctattggaaccccagcccagatacttaccagcgatggggctttgggcaaaggacttaaccttttaagactccattttgcatctgtaaaatggggatattaaaagatttccttggtaagtaaaaatagggctcgcggagcaggtggcacatagcacccaccatctgagccgtcactgctcacagggcattaggttgttggaatgacattcagcagcaggctgtgacctgtgaacccaaactctcctaactcctcccctttgccagctcctccaccttcagcacaacacagcagccactctcgtgcatgggcagggcctgggcactttacaaagcagactactcgggccctgccacccagattctcacacataaaaaccaaggtggaatggagagtccaaggacagttggtggatgcttgtgtaaaagtgctgggaaacttgcctctggctgcccagctgtgaagcgtgagccttgcttcttgccccacatccactcctagtcattcaatcctggttccctgctttgccaggagccttcatagacgctgtagaatgagagggtgagttgcttgaggggtagcacagatattcctgcctaataaatatgttaaatcaaacaggctcattagaagccggaggctaatggccgacttacaataaaatgccgagtctctcctcccccaggaagtcttccttgactctccaaattttcactattcccttccacttatgagtcctcgaaccaccgccacacagtccattgcttagtagtggtgtgcttgcctacctgtttcatgggaatgagtatttcttgaaggcaagcgtcatgtaattttcttctatgataaggatatttaaggtgtttattggacccactaaccattggttgccaagtgaagagatgggcttcagactgtgatgagtgataaaagagttctgcctactgtggaacctgctggaactcatcacttgtgctgaaagtgcaacatccccaccacacacacacacacacacacacacacacacacacacacacacatacacacactgagaaggaggaggaggtatgagtgtcctaccatagagatggcctcagtggttaccttacctgtgttcactcaagagctaaaatgttctccccaacgtcatctctcatctttgggtatttaaatatctaaaatatgttttggggatgccctggtagaaatttctacacagctgtgcttaaaaggagaaaaatctagtttgggtttctgttcaagactaacaccgctgggtttttcaactgcacagatggaattgcagtaaaagtctctctgtttcttttctacagccatctgagggatccgtgttctttcatgaaatcattaatattcttaaaatacagatggttcccgtttccagagacattggtcccggggtctgtgaaattgtgtttattttcattttgatgccaccatttctcaggcaaaggttccaactgctctccaaaactttaaagagtgctctgtcaggatacgtagtgaggcagctaagcacctccctggagtgctaagtggttcaggcagcgccagatgccatggagcctgatgagtgttctaggggaaccatgtggaagggagctctcccagagagaaagagaagggaaagaaagagggacaaggggtgagggaggctgcctaggctctcagggagcctctaccttcctgcagtccttgctaacaacgtcttctcctctgcagaccccacactgtggacacaggagcatgtgaggcaatggctggagtgggccataaaggagtacagcttgatggagatcgacacatcctttttccagaacatggatggcaaggaactgtgtaaaatgaacaaggaggacttcctccgcgccaccaccctctacaacacggaagtgctgttgtcacacctcagttacctcagggaaagtaagtgccgcccaagtacccagggctgggaggaagcttggcatggagccaacccagggagaggaagtcagtgctgcccgttcgtgttgggcagatgccgccggagcagcatcgtggggcctgtagtgttgccaaggtcacgtgggctcctacagaccctgtgaggggcagacccaatcctgaagtgtcaaaggaagtaagacgagaaatggagaaaagtagagagctgtgacctggaggggtctggcagaggctggttacactcttcccatgagaccgcctttccagaaactattccaatttgaaaatagatagagatgggtggtgccctggctggtgttttcctaagtgattatttaaaattcctccaggaaactctagattcaaggcttttggatttaaggtgttgaaaataatttacatattagcttcctcttaatcttgggatactctggcacaccctaaccccatttgacagggctgctatctgcacacttccttgataaggaagagcagccaaaggtgcaggtgtgttaggatccattggaggctttcttctggtacagccaagaaaaggaaaagagctttggaaagggcgagcttaagaaagaaagcaggcagttgtccaagagatttatctagtatgaggtactctagcaccaagcgcccatccgtctgatatgaatttcatttgatatgaaatatacacagagcagaagaatggaattattttagtcctgctggtaacctcagcctgagtgccctgctgggaatccaggccaggtggtatatcaatatcagtgctacccctaagtatggaaggattgtcctggggcctgaaaagatggtgctaggatcacaggaacacaggtttgggctcacactacgtaagagcattctagcagccctgtgcaaagacagggcagccttgagatgctatttgttgtgaatggccaaggcagctgcgagtcttgcaggagtttagctttgggcaggggcttgatgattttaagcccccttcgcaagttcagatccttagacagcaactctgggacctgcttttcctggactggctggctctgggttggtgagctctgtttgctcgccatcgttctgtggacctttaactccccatctttggaatccactgtcccttcagcgacagtgttcctcatggggcaggggcaacacgtgctggctggagaaatgaaaaatcaaaaaactggctttggcagtttccactggtgcctctgtgctctctggtcacctttccgaggcgtctggtaactagtgcgagaaagtagatgatgcagtatttgttagctccggagcaattacctcatgtctgagtcttgctgcaacatgaggtcagcccaagaaacaatttcaaaaaaggggacaattttccacccagtttttcagagctttggataattagcactttctaattcatattttcagcttttaactgtttgtggaattttaaaaaataaggatctttgaacagagtcctgcagtgatctaggcaggccagggtgggtgtgtggaggttagcatgagaaggagagaccagcaaagcaacctgattccagcaggagtttgcaggaaccctaagccctttccttcatttgccaggagtagagaggacaacagtagcatagacagcatgctctgaactgttagttaaagggcccagtgcttcgagactcttcggcggatgcccttgttgggagaatgttcaaggcattctctccatgtggggaaagcccattcatgccatatgaccccggggccctaaccagtccataaacagcccaaggtcccctagtacttcctgccaccgaacaatgggaacacagatgctgaagtgagacaaatgcctgagaaggtggtcactggtcgccagtagagagaccttctattggagaagagcagataacaaggttgaagtggaggtgcagaggatggcattttggggggtatagcatggcaagaaaaagcaaattgcttctttctttttaagaatatttatagacagaaagtgcccccaaatcaataaaaatattaggtttcccaaaagggacttattagtggagcatatttccagagtggagaggaggtggaatccagcttgtatactgaagacatttgaaaatgcagggcagatatccagagttgaggatggtggcgaacagtagtacatccacaagatgggaagtagttgttctgccattgaaatgattattgggaaacaccatgagaagtgcttaggatacaatgttgggtggaaaagctcattataaagtggtctgtgcactgatagaaaaaccatgtctgcctgcgaaagcaaaaaattaaaataatcgtgttaaattaaaaaaaaaaaaaccttgccccaacatggtattgaaatatccttttgaggaacctagacttaaaatgatccactgtcagggaaaaggcttttagattcatgctgctttttaattggtgtctaccttggggttccagccttggggaccctctagtgtgaggtggtggctggctgctaagcgcctgcaggaggccatgggctggcgatcgtgtctgctctgtttctgctctggattgctgggaactcccccgtgacaaccagcactttaaacgcttttaaagccttcaaacactttattgtttttccagactgacttccagtggatgttttgtgcttaggtggaaggccagtgcttgcggagagtttgaggcgatgagtcaaggcaaggggagagggtgctgattctttgtgctttatcatcttgtcctttcattggagaggaaggtggggctcagatatttccactttagcaagagatggatggaaaatagctgagatccttcactccggtggaggaagtactgcagggtgaaggaaagttgatagagcagaatcggggacctgagactgtggctggttggaagtcagtagagtccaagttggtggcacttctctgatctaatctttctgggctttatagaaagtctagaaaaaggaaaacttcataggataagaagctttggcatcaaatttacatttcacaaaaggtgcttgactatttattctggtggtttgggaggggagctagacttttacattttaaatgcaaatgtattttccagggtagagaagaaatagcagttccctgtgcccctacagaccctgtctgatggccaggcatgctagggaggtgcttgttcttcacacctgggcgtgtcagctgtgccagaggagctgtgtcacacgccacacaggcgcccacccctcccccccaccaccacaggaaatgcaaggaggactgtgatggctggggtggccacggttcttgggggtaattcccatgagtcctgggaaactccagggtttacacctgtcaatcccagcactttgggaggccaaggcgggtggatcacctgaggccagaagttggagaccagcctggccaacgtggtgaaaccccgtctctactaaacatacaaaaatgagccaggtgtggtggtgggcgcctgtaatcctagctacttgggaggctgaggcaggagagtcgcttgaatgcgggagggggaggctgcagtgagctgagatcgcaccaccgcactctggcctgggcgatagaccgaggctctgtcttcagaggaaaaaaggttgcccccttgtggacaactatctacagtacccattttgaagctgaacccactgaggcccagacagcttcagaaattggttcaaaggcatccagccgattgagagcacctggcatctcagactagggcctctggagtcccagtccctggcctcgcgttgccgacgttcccccggccctggagacagcaagccagcctgcgccacacaggcaaggcagcctcactcccggccttccacgtgggcagcccggccacttcccccacagcattttctgttgtcatttgtaccaagagataaatgctttccaaaaactttcctgtggcctcctggaaggaggccgattaagccaaacctatcaccacgctaactttgtccttctctgggcctgactgtcggccccaccagtatctctcccggacacaccccgtgtggcagaggagccttcgcagcagctgctgcgggaacgagatttgtcccttctcaggccaaggcggggaaggacctcgaagaaacggagggcgccgggctggcagttcaggctcagggccgctggggggagtttgcgcaaggctgggagccccgaggccccgggggaggtggggaggcagaaagaaaaagagccttttttaagttttacaaacaagttcgttttgtatgtcaatctgggtctgacctggaaaaaaaaacactaagaaactgcgtcttcaaacagtggctgctcaaaagaatgaaactgcgcgaccgggagaccacggaaagggtgtctatcttcattcccatttttaatttaaactttaatggaaaacacattttgcattttctggtctttccacctgcagcctcagatggtcgggcagaggttttgggtctgggcaattaagctggtgcaatcttatcacttccaggcctgggtttgactggtgaaggagaacagaatgccagctgaacaaaaggccaggtttccctggacccagtagtcagccaggattgttgtttaaagatcccagagccttgcaccctcccgctcctgcacactcagccagagctgttgatatagcagtgcagcccagagaaaagagagacctggattcaataggctggctgtgagggggcactggtgaattctatggtcacagcgaggcaggagacaaaggctttggcactgggacgcttgcgccccctggcccaggtgtccccgatgaaaagcaggttaggttgagggaatgtgaagcagcagaaaccgtgattgttggggttctaccccacacctgcaaagcctcacactgctcactcccctctcctttcagatccaggtactgtctctagcagcacatggattcaaacatggaatggaaaatgatcttttccccatgcttgcactttgggaaggccattctattctcagcaggagctactttatgctttttagagcaaaaatgccctcaataaatagatatatgtatatgcatacacacccatatacaaatatatacatacaaacacatatacagaaacttacaaataaccaagtaggcaaatcttatacttcagtttgaactgaagtacaacacagagagaagtgcaaaaatcatgaagtgcgctacgtgagacattatcgtgacgtgaatccacccactcccataagcacctcccgggccaaggagtagaatttcagccccctgtaccctctctccaccccacaaccgcttcctccacaaaactaaccaccaccctgcttcccagccccataggtgagttttgcctatttctacgatttagcctggaggcagtgggatctgccagattgaggacaggttttgtgaatagaccacgatggggctcctgccttctgcactctctggctgtgtgatcctgggaaaatgatatgacttcgctgagtgttgctcctttcatctgtaaaaaggaataagggaatgctggctctgtatggcttatgcaaggattaagtgagaaaatagatggaaagcgtctggcacaccgtgcatgttcagggagcactgcgtccccaccaccaccttcatcatggcctgtttaccctgatgtgctggcatcgggaaggtgggggagctcagcagcacaggcctgtggcagggtcaggccagaaagagcctcaaggcaggagaaagcagtccaaagccacagagagggaggccagactccaggaggacctgcctgcatcagaacaagttccttaagaaaacagagcctggggaactaatgaagtagaaatcggagaagaggagggaatctaggtcccttgggagagaggccagatgcccccaaccagcccctccttggggaaggcagcctctccttctaggagtgaaacttgaaccaagaacagtctttagggcaaaatccttttcctaggttgccatgaaatatgcatttcatgcaagctttggagaggtcaaatgaccctttctctcagctttctgggagtttcctgtggaattcatgtgtgcccaaagaagaactttcaccaatggggaaatttaataaatgtggtttatctaaggttcgtgctttcggctacatctgcactaatgactcaggcagtttgctcctcggagaccatcatttttctttatttgctccagcagtgaggtttcagcctgagggagagaacgtcagggacggagaggcaagcattcttggtcctacttctgggatttttttgtattccctccgaacatttggttccatttcttcacttccttccagtcgtgccggattatttcttattgcagcagaacccattcataactttaatcagaggacaggacgaatgttcagtaaacgcatgtataaagagaactattgtatgtaattgtgacatctgtgggagaaaggatgtaaaaatagtaacgatcatagctagcatttatggaacacttatgagccaaggtccattctgagcacattgcatgcattatttgatttaatcttcataatgccattgagtggtgttagcccattttacagatgagaaactgctggctcaaagagatgagggaaatcagtggagggcacaaagctagtcagtgataagaggcaggtctaattttaaagtctcctttgcttaataaacatacagtcgtgctttgcttcatgatggggatagttcatcttcatgtgaataccacaaaatgtacttacacaaacccacatggcatagcctactacacactgaggctgtatgctacagcctgtggctcctagcttactaagctgtatagcatgttattgtactgaatatagtagacaaccgtagcacaatggcaagtatttgtgcatctaacttttaaaagatacagtaaaaatacactattaccgttgtcgtatatgtggtccatctttgcccaaaacatcattttttggtgtgtgactattaacaggaacttgtcccagccttactttgtcattggtattcttgaacatggaataaccaaatgtagctggctcttggatgttatattcatgtgactgtctcatttctaaaatggcatccacatagccacactttggcatacagcgggctcaataccacccccgtcatccccctccttgttttcatctggagctgctgcagagctagaactaacagtcatattctaggcaattggacaattcttataaaattctcttcctctgccgggtgcggtggtaatcccagcactttgggaggccgaggcaggcagatcacctgagaccagcctgaccaacatggagaaaccccgtctctactaaaaatacaaaattagccgagcatggtggcgcatgcctgtaatcccagctactggggaagctgaggcaggagaatcacttgaatctgcgaggcggaggttgcagtgaactgagatcgcgccattgcactccagcctgggcaacaagagcgaaactccgtttcaaaaaaaataaataaataaattctcttcctcatcgtctggcttggatagtgcacacattttctctgaggcacacaaccaaacgcccacagctgggtgaggcggcaactccatttcggcatcccttccatgactggagactaaaaataggggtgtgtctgacagcccattcccacccctggcacccaagccagtccactcggccacagggagcggggaaaagggttgtttagaagaattttcttagcctcgaatacatgtgttgagcttatggtatgttttataaaagcagatcccagccctcgtttcaagggctctttaagatttccttaggagaatctcaaagagaatggcaaaaatgcctaagtttcacaaaatacaaccttgaattcactttaaacaaaggaaaaagtctagttttaggaaagaagggagaatgtgttttacatgtaacaacaaattgctttttcaaagtgctgggtacagaagaggtatgaattgaagtttaatttgaaaagattggatatcagcattctgagattacagaaaattcaacgcgtgactcctcaggttcagtgcgtgctcttagacataggtgaagggaagcaaaagttcctattggaatactaccactcacctccttcccaactcccattgccccctccaccagtaacatacctgtgtaccttaccctcacctgtgaaaggacccatatgtacataaacccagaagataccacagcaggaaggagtgatactggcttctcctccaggccatggcaaagtacaagctgcaggccaaatctggccaaaagtggcccatggacaaagcaaaacaaaaactaagaagactgtgcaacagagattgtagttagcctatgaagccaaaatatttactatctccttttgatagaagaaatctgccaacctctgctctagttcaagaaaaaaaatcaaaatctagacatgtcaagtcactcaccaactgtcacatggtgagttaataacaactggaatagacccgggtttactgattctcaatgctgtgttcctatcatgattatggcacagaccacagcgcttcagaactatgaatatggcagcttagggggcgtggtgtttgtttccccagagagcatttcattccaaagtattctgtctcttcactccataaagctattacaggcctgtatgattgtctccaaccaaatggattccattcgcttttcctttcttcctaggagtcctctgtccctcttcccctctccccatctctttccctttctactccctcctcatgtcatctcctactcttgatctcagaagaacattttggttataacctgtttatgttttgcctctcaggttcactgctggcctataatacaacctcccacaccgaccaatcctcacgattgagtgtcaaagaaggtaagtttgttcttttgtgcacttaaaattttcttctgtaccagacatgacacaggcccatgctgttaaggttgttgcagaaaaccagcttgcttgttccactcaacttttcctagcatacaaagacaagccaaagattttcgccacttgtgctaccagttgcaaaaatacagtaaagaaagttttacagtatcttgtaataatatcacaaagatacaacttgaagttgtcactccatgcaggaaaacatgttacttttagaaaaaaatgaatgctgcttactttcaaagttgaaagttgggagttttctctgatgaaaataatgaaatgaagagttcaaggattccagcatgtctacctttaaaggtttttttcctaagaaattttagcagccggtcatgctggctcacacctgtaatcccagcgctttggggggccgaagtgggtggatcacttggggtcaggagttcgaagcccagcctggccagcatggcaaaaccaccatctcagctaaaaaatacaaaaattagccaggtgtggtggcaggtacctgtaattccagctactcaggaggctgagacatgagaatcgcttggacccaggaggcagaggctgcaatgagccgagttcgcgccactgcactccagcctgggcgacagagcaagactctgtctcaaaaaaaattttagcgatgtcaattcatttttaaagtggtggcttaagggtttggtctggtttggtttggttttgctgagaaagaaaacttcctcggcaaatgatttttgccagtgaagattttagtacacgtcacaatagaattcctcagcgtctttatgaaacatcgtgaggagtggttcagatactgttagatttcaggcattgaaacaagtgaataattcatagtacctggtttaaaggaggaaaagatgtgaacaaataattattaggaaccagagagagactggaaaaaatatttgcgcggcatagcaaaaattccacagaggaggggacttttgaataggagcttgaagaataataagagtgtggcaggcactctgtcctccttggctcgctgtctgtccccagtttttctttaactcaccctccccaaaatatataagaaaggcagaagttctcaggatcagttacatatagcacagcactgcaaaacctttcagagaaacaaaggctcttctaagggaaggaccatttggcttaaaatccgcatggggtgtgaaggaaacagagagccaaaggcactagctggctgtcttgcccaaggttacaactttgatcacacagcactttgtgtttcctgttaacaatttataatttaataatgaccagaacatttagtggaagaattatacaacataatgaatccgcttttaaacatttgtgtttttcatttgtttccttctctcctatcccaccctgagccagtcctgtttctgccactgtttttcctttccaaatcagatttcttgagttttgtcatgaacgctgaatttctatggattcattctacattgtgagtcagatttcactttttgacctattttaatatgctgttgcaaatgtctgtaagagagaaaatacattttagtggcaaacgcattagattgaaggtcagggcacctttggcttcctgtgagaaaaccacttcaggccctgaacctcagtttcctgcagaacgaaagagaagaactctgtcagcaagaggccagccctgactctggagatcttggcctctaaggagatgacaggagcactcacattgcgagggctcaagagccactgtcctttgatatgttctacatactgagttttatttcatttgtggatagggatccactttttggaaggaaggaaaaaagaaggggaaaaatgactagagggagagagagagagggaaggaagggaagggaaggaagatagggagggagaaaagcaaggctataaggaaggaagggagggaaggaggaagggagggatgggaggaaccctaacctctgaactgctgagttcggatttttgtaagtttctccaacacttcaggctacaacctgctaccaacatcagaattagccagtgaggctctgaagcagagctaatgaaatattttctgatattgggcttcagatatagggtttagtttagaaactggtttagccaagttgaaatgtgttgctaaccatctcctcctcctcctcctcctcctcctgctgtcttattgttcagccgtgtcctctacctgccatacacatttccttcccttggcccttttgtgtttagggaggacgtttgtaacactgctggctcattcaggcttattgcaggagcagctccctcttgctgggtagcaacccctcttctgaaatgaattaactgtagtatccaggcaaacacacgctgccaggacctcattcaggtggtgccggcatttatctcccaacatcgggcctggcctctagagacgattaagcctgtgctttgcaggtgcatcttttgtccccagtaaagctctccacttgagctgtcttgctcctctatgccttccccttgtgaggtggtctgaatctgtctgaacgacccatcaagccacaaaacaaagtacattagcaagacaaagctaagcaagccctccctctatcctccctgcctcctccccacctctcactggctctcctgctctgctctaatcactatctattagctattagaagacatcaggcaaccttggctccatcttctttgaataagacacacacagccccaaacaaacccagagttcatcaagagcaccagagctgtgtgtgtgtgtgtgtgtgtctgtgtgtgagtgcacactggtgcagtccacaaagggcaggtgctggcatcaagcacaaagcaaggaagttgaggagatgctgtctattaatgtcttcaaagcacttatcaaattagaatggctttttgctttaaaattgtataatcacccttccagcttgtctcttgaaaatggctgcaatctctaggggttatttgtgcccaggaagtaagagtagattttaaaaattaatttagaacaatctttaagcccctttaaattaaatattctatggacatggattggatccagctagagcagttatgctctacctttagtttatcaaggctaaggcacttaaaaaaataaactaggataaaagctattgttatccatttacaatagcagccacaactgtcatctgtaaagggttttggaatatatcagacacctccacatgctttgctttggagcctagcactgggtctttgaagtagatattattatctctattttgcagacaaagaaagtggggttcagcactattaagtgactcactgaagggtacacagctactagatggcagagcaaggactcaaaccaggttagaggattagactagaaccccctcactttctgacaaatacagcctttctcttccagctgccattctgcaaaagcaatacctagcctaaatgtaacttgggcaaagatgtgaatgttttgcattacttgatttctgtccatgcagttttcccactgtcagctccatctccatccctaaacttttctctctttccaaagatgaaccaataaacaacttatgcttggcaccagcccttagttctgacagcacagagaatcaccaggagatctttcaaaatactgactctaggacaaacattgcatgattgcactcataggaggtaactgtcaactttgtagagccagaaggtacatggtggttaccaggagcggcaaggagtggaaatagggtgttagtgtttaatgggtaagagtttccatttgggaagatgaaaaggttctggagctggatggtggtaatcgttgcatagcattgtgaatgtacttaatgccactaaattgtacacttaaaatggttaaaatggtaagttttatgttacatattttactaaaattttgtaaatgcaaaaattaaaataaaaaaatactgatgcccaagtgccaaaaaatgatgcattaattcagaacctccaagggtgactcctgggcattggaaatgttttagagctctccgggttattcatataagccaagctgcagccaagctagagaagcctgctttatagaacagagacaaactagagagaaatgaggcccatgttagagctactccagattttcttggagacacactgggcggttgtctggacccagattgtcctagaaaaggaatagcaggccctactggtatattgataaaggtataggtaagtgaagagactgtacgatcttgattagttttttgtcattgtcattgatgactgattttattgatgcatgatgttactgatttagacaactgtacgttcgtacatctcagaaatttctttctgacgtgtcctcattcagtcctctaaaaagtagatatggtgttggtaacgtgattttataggaaggatactggggttgcagaagttaagtggccttttcaagtgtgtaagagtcctggagccagggctactgactttccacaccttgttctctcccgtcctccaggctgcagatgtgcgtgtgtctgccctggtcccaggtcagagcttccctttgtttttctgggcaaaccctgccggaggccttcccagcacactcagctggcccagcagtgtgcaacaatcagcacatctcttcctcagagcttctttgcatgcctaagccctcatttccttagttcctcatgctgaatctgtttaaatacctctgactttccaaaagacagaggatattgagttccttgtttattaactcctggaactcatcaaccggccaagggcctgtggagcactgagcttctagccccagcctggagcctttcaggactgccattgaacacggaaactgaaaaccacagccccactgcaagcggaatggccatctccagccattgccttggctgatggataaaaagtctgtcggcttgcatgctaagtatggaaaagagaggggagaaactacctttctgtgtcccttagagtgaaatgcctggctggtgctgaagcccatgttaacgagaggctggcttctctccaggagagtcctaggtggcaggagccatgcacatggtaacaacagcattttggcagcctggtagggtttgccaagcacgttcctatccattatcccgtttgtgccctctggtgccatcaccatgagatgagaaggctggtagtattattatcccccttctatagataatgaaaacaaggcacagagagatttcagggttccttagaaggcacccaggtcatgaagcagaacaagactcaagtccgggcctttggtgtgttctgtccttcctctaggctgcttctggaatcattatctcagcatacttgattcaagcatctgacaacatcttaaggattctttaatactctcaatttaccgaaggtgggcactggtctcctatttcagcattatagcatactgattaaaaacttgggctctggactcagactgtgacctggacaaggtgcttacatttttctgcctcagttttctcatgtataaatgaggataattgtagtgccccttcagggataatgtaaaactcataaatcagcacagtttctgacacaccaataagtgctcaataaaagttataataaggatagtaaattgttattctaatttattatagtacaaattctaatagtaattaacattattattgaaagctaattacaattttttttttttttttttgagatggagtctcgctctgtcgctcaggctggagtgcggtggcgtgatctcggctcactgcaagctccacctcccgggttcacgccattctcctgcctcagcctcctgagtagctgggactacaggtgcccgccaccacgcccagctaatttttttttgtattttttagtagagacggggtttcaccatgttagccaggatggtctcgacctcctgacctcatgatctgcccgccttggcctcctaattacagtatcccgctaattacagtatttttgagggtttaccagatgttaacaccgtaccaagggtcgtgaaggatactatacatagatagccaagctgctttaaaacttattcgggggccgggcatggtggttcatgcctgtaatccctgcactttgggaggccaaggtgggcagaccacctgaggtcagaagttcgagaccagcttggccaacatggtgaaaccccgtctctactaaaaataaaaaattagtcaggtgtggtggcatgtgcctgtagtcccagctacccgggaggctgaagcaggagaattgcttgaacccgggaggcggaggttgcagtgagcgaagatcacaccactgcactccagcctgggtgacagagtgagactctgtctcaaaaaacaaagcaaaaaaacaactatttagggagacacacctaggaaatatgaaggaaatataaaactgcatgtaatcgaaaaacaacaatgcatgctacacacaagaaattttctgagtgtaatgaagagatggaaaatcattaatgctcaagctgaacatctcctccaaatcccttatagaacaggagagatctgaggccagagaaggtgtggacccagccatggtcacacagggagtgaagacaaatatatacaattattcctatgtaggcagatgttatagatacatgataccttagtcaggaattgacctaaattctgtgattcatgctctcctccattcattcatttctttcttatggagaatcttctctgcatagaataccaggctgagccctaaaaccatggtgaacacagcacactacctaccctcaagcaggttctagtcaaacagagagacagacagctaagtaagtaaggaactactgtgctttagagtgagggcaatgcacgtatattaccacgtctttcaattttcccctgcatttagctcctgtgtggatgtcctttatgattttagaggtcatagtaaaagatggaggcctctagcaagctgcagcatggcagggctggaaatagatgttgaagcaaagggaaggaggaaggcaccaaggaaaccagcgtgtttgttggggtgggtgtgtgagctttcaagttgggttttggagacaggagcccaggtgagcccttgcaggaataactgaggcctgggtgtttgatgtgggtttcaggaagacaccctggggtagaacctgtgcaccatggcttcctggtacctggaaaaccgggtgcagttggatgtttcattgtgagacaggaagctcagcgaaggagcggagagccagggacttgtgtcaaaatcatttggccggggagggcggagtaggtgggcatggagctgaaataagactgaccatgaattcatgattgttaaagcagggtgatggggcctcagggttcattagactttcctctctacttgtatatatcttagaaattctccgtaactcaaaaaatgcctcaagatatctttgccttatttctccgggcgaagagtttcctgaggagggcatctttgtccctcgcgatatgcactgcctgtgtcaggctgatgcgctcccgggtgcagtacttgggaaggcgggcatttggcagccttgtgtgtgtgtctgtgcaggagggcgtgagctggtgctcagtgtggaggtgggctgtgtgtgttgccttgtagagtgcagcgtatgggggctaggtctggaacatgtgtacccaaaggaaaaggcctgtaatactgtgaggtaatctcctgttatttttagggagtaaataacatctctcatgcagcaggttgtgtgaccccacaggccccatctacgtcagctcacacacacttcaaattggagggtatcgcggcctcacaggagagcctgtgaagaacattgtcattatatgttcttcctttatgatgaaatgtgcctaagccattcttagcaaaagcagggatgattgctggatgtgtgtgtgtgtgcatgcattcgtgtgtgtgtgtgtgtgtgtgtgtgtgtgtgtgcacgcgcgctgtttctgtggtccaaaggcaagatttatgattatgggatagacagtagcttgctctctctattttattttttaaaaactgttttcctttgaaattcctgagttaatgttctgtctgctttctatctgaccctcttcggagagttgcattttttttttttttttcacgagagagagattaagagagagagagacagagagagagagagagagaacgagggtgacagagagaaacagagatcgggggaggagggagagcgagagaactggaaacaaagactcgttgtctctaagctggagcaggcaggaaaccccaatccctcgggaacttagccagcccgccctgtcctggagtcagactccagctctctgaattcaatttgacagcttgtctgggacactttctaagtaaccattatccttcctttctctaagtaaaaggactgttatttcttttcgtgggtgtgctgtgcgaactgctattgcacacgtgtggctcacacagtgactaggacacactttcctcaaattattggaaacagcccgtttcctaagacaagtgtaaatttgttccaggataataaggcaaaagactgagtatcagtccactgccttattagaggtgggcctattccattagaggaggaattttgtgtatgtaggttttacttctttgaggattcttttgaaatagacacaaacaacaatatctcccaatgatcattctccccagtttctgtgttaattggtggattaatttaatgaaacgcatcaccatacatcccactgtggagggaactcagatgtcctcaaagctaccagaggttgtgcaggccacgggcacaactaggggtgaccacctagagttcaaaggaggctgtcttctgcctgggaacagggccatcctggggtttcttttaattactcagacccagttgagtcaccaccataacctgagggactgtgaggtgatcacctgcccttcaatgtgttcctattggaagaccatcccgattcagctctgtgggaccgctagagacaagttccagaactgtctggatccccctggagcgtagaggtgtgatagttttgctcagtaatacagctttgcccatttaggttctgacccaaagacctgtccttcaaacatgacttggttcctgtctactctatcttcaaccacactttggaataatgtttccccattcttcctttgccgggtatacctttcatccgtctcagtccccacccccagtccatattctaggaaaccacactcaccctttagggccgtggtcagatcagacagcatcacctcattacggtcttgtgcacccttccccaggatgctttgcttatacccactgttttaccaatacagcattcaatagattctagcccagcagtcttctgtcttgtgagacgggaagcgtcttgaaggtagggactattggatggatggatgaaaataataggcaaagtaccttaaactgttccccagcagtctggtgtagaactaaccctttgagatgtttctacaaggtggatgttttggctctatccactgcagctgctggtgtggcattgcctttcctccctaccctgccctaaatttccattgcatgggaccccagggtggttccttggaagctgtgatcagtcccatccctgagcagggaagcaaaactgataaagagcagatttcaatcacaagatgatggcaccagagccccttcttggcccaaccaccgcaggatcctgctgccaactggactccacaggcccttcaggtctctgcccatcaggaggaggctgaggacacgccaagccgaggaaaggtgacgctgcagggagaatgtaccttctgctcaattccaccttcctttcttcacttatgccccagacagccacaataagagctaacatttgttaagcacctactatgtgccaagaaatttcctattcatttcacatttatccttcataaaaccttgttaagttggcactatgattattcccattttacctgaatcacaggtatgatgttaagcctgaatcacaaagctagtatgaaacagaaacagaagagagcctgttcctgtagtcccctccccacctaggcaatggcaagggctccaaaatgaccctttcctacttcatctaccacccccatcatgcatttcccccaagtagctgatgttgtctagttgctaagatatattcatctattgactcctgctaccatctaaaaaatcaggagcctgacccagtgcaatcaatcttatttgcatttcaagaagcaatctagcaatttagaattttagaaattccactataaagaggttgtttgccaggtgggatggggcggtggtaatggagctgcaaagtatataaaagaaacatgctttgtccacgcttatcagtcaaattctttctttctatccatccctggagagagagagggagaggaagcttcttccatgccacatggagacaaacgggcttcagacatcttctagtgaaagaccaacgtataggaagcatcatttgtggtggtttcacagattttttttattgttacgctttataatttatataattatacacatatccttttgtgtttaatactacatttaagaggataaaggaaaacaagagatttagaaaacaaagtattatattgagtaacactctattgatgagaatttcaataaactgaatttaagaaaccatccaggcacagtggctcacacctgtaatcccagcactttggaaacccaaggtgagaggatcacttgagcccaggagttcaagatcagccctggcaacacaactagaccccatatgtacaaaaaataaacaaaagtagccaggtgtagtggtgtgttcctatagtcccagctactccagaggctcaggtgggagtattgctcgagcccgggagatcgaggctgccatgagccgggattgcaccactgcactccagcctgggcaacagaacaagaccttgttctcaaaaacaaagcaaaataagagtgggggtggataaattcaataaatttaataaatttattatttgagggaaataaagtttccctcaaataatttcatgggtctatcagtttcatgggtaatcctctgcctctgtaagcttcataaacccatggttcccaaggagaagaaggaagagatgtcaaaatcaacttaaagcatcttaaagacacgtccaggatgctccagctgccccaccctgccccgtgtccctccataaattcacctgtgcccttggtagatgaaggaatgaggagaaggttggagatgaacacttgtgttcttagaataatctccttccattgctctggaatgccccacccctgccctgccccagtattgagagccagggcttcatcccaatgcttaactggagaagaaaggcaccttcctgccactacagagttcgcctcttctcacccctgtgccagaaggctccaggccaggcactgctcctgaccactcagaagttcccactttgccctttctgccttccctgggctgtctttggtctttctgcttatcagagctgcccttaaatgcaccctgaataaatcaagaccctcataggtgcccatgtgctctgctacattaatgatggtgacaatgaatgcatgagccctgctacattttagtaaaggacggtgacattaggtaaacctccaagtggggcagggaactggtgccaggctgtgggactgttgctgggggtctccagagcaccctccccattcgttcccattggactcagcccaacaatgactcctcccgcactgccaagaaggggctttcatgaccctgagtgcttggcagggtagagctccactacagttctcagtggcagttcacatccactggttgggccgtttgggttttgcatgtcttctaatttatctgcagactctgggatgttactattttaggcctgccatctctaccaagtttccccttgacactacacgctcatcccactccagacgacagagcgaggactgcagatgcagttggccttgcttgatgcagcttcattgctattgcttggttcacaatagaagttaaaagtgatccccgttggccatttagaggagaagggtcccaaaatactttgggaaaaaaaaggacaggcctataatgctctgccaggggccacctcagcacagagtgttccaaatgtgttggttctgcctaatatactgatttagaaattccaccacatggaggttatttgaggcgattggtagctggaaggtatttaaaagaaacttgtttcaccaaattctcatcaaccaaattctttctttcatctatctggagagagagagagacggagaagcttcttttgtgccagacagagatctatgagcttagggcatcttctagtgaaaggccaatgtataggaaacatcatttgttattttaatataaaaacctttctaatccctttttatagattgaataactctctctcttcagaagcccttatctaagataataaagagcatatttctcatgaaatatccttgttggagaaaagaaagtccttgaggaggaaatatggaggctagaaacactacccaggttgtgagtgggctttttctttcttgtctcagggatctgtaagatcgagaagtttaacatgggtcaggtgtggtggctcacgcctgtaatctcaacattttgggaggtcgaggtggaaagatcacttaaactcaggagttcaagatcagcctaggcaacatggggagagtcaatctctacatcaaataaaaaaattagccaggcatggtggcacgggcctgtggtcccaactatttgggaggcttaggcacaagaattgcttgagcctgggaggtcaaagctgcagtgagccaacattgcgccacttcactccagcctgagcgacagagtgaggccctgtttcaaaataaaaatattaaacagaggcttaacatgcctctttgataaagtttaaattcttgtatttggcatattctaaagaaaagatggtaaaattaagtgggacaattactttatctgtcaaaatccaacacactcttcaaaacccgattcaagtcctatctgcctcaagatatgtttttcttcctccttaagactatagtctcctctcggagcctcacctcattcacaggctatttatggacctaattacagattaccttgtggtctttaattgtgagttttctcctggctcttttcttccagccctgtatatattcagtaaataccattgaatatttactcaatcctgctccaataaaggaagaaccagaagaaattagctttggttgacacaagaaaaattaacttcttatgtcccatgaactaaactctgaaaaagagtatcagctagagttctgtaggatgcgttagaatatagaaagcaattttttttttttttttttttgagacagagtcttgccctctcgcccaggctggagttcagtgacgctcactgcaagctccgcctcccgggttcacaccattctcctgcctcagcctcccgagtagctgggactacaggcacccaccaccacgcccaactaattttttgtatttttagtagagacatggtttcaccatgttagtcaggatggtcttgatctcctcacctcgtgatctgcctgcctctgcctcccaaagtgctgggattacaggcgtgagccactgcgcccagccctagaaagcattttcatatgcatggtgtcatttattctcaaaagatccctgtgaggatccagtgtgctatttgcttttccaaactcttaaatttaggaataatcacaccactctctcccgcccctgccaagtatctaccttttacagagaggttcaataagaggttcagagaggttaagtcatttgcctcagaccacacagctcataactgacagagatgagaggcaaagcaaggagttctgaccccccagcccagagttctttcctttgcaatgagccatttccctgtttggaatggattcacgagaaattatggaatttcttcccatgaagatctttaagagcccttagtaacaccaccaacagtcctatgcttgataaattttaggtatcactcttccaaagagatgaaaatcattcttggtatcattttgaaaaatctttgagcttaagaagtcttcggccttttgggcctgtctgcaaaataattatcagccctgcccaatacactagaggaggttagagagaggcagttttttgctatgagtcataatttcaatttctattaaaattcttacatggccacatatgctacctctcaggctttgggcctctgggcctgtgctaatttgcatgtctggtttagataatgtctgaggtccttccagtctaaaaaggagcctctgatgctgtgatataataagtgagatcacattccacctaccaagacttgatggttctttttcttttaactactgtgctctgtctgatgtgtggatgcacagctcagggacggaagtgtttcctgctcacctgccaggccacaaaagaaggagtgctcttggccgggcgtggtggctcacgcctgtaatcccagcactttgggaggctgaggtgagtggatcacctgaggtcaggagttcaagacaagcctggccaacatggtgaaaccccgtctctactaaaaatataaaaatcagccaggcatggtggcaggcgcctataataccagctactcaggaggctgaggcagaagaattgcttgaatccgggagacggaagttgcagtgagccgagattgcgccattgcactccagcctgggggacaagagcaagacttcgtctcaaaacaaaacaaacaaacaaacaaaaagaagtagtgctccttcagcatgaactcacctgtccacttctgctacactgaacccagagacttgtcctttcctgcaaagcatttcagacataggtcaaaaggcaaatcatgggaattgttgggattttacgtttcttgatttgaatggccgttctaattcaacgtgaatccaagaccacagacttgacaatcacctgattcaaaatatgtgaaaagtacttgagtctttaaaatatggggttcatctcaccttttactattcctctcccaaacatcaaagagatgctgtcaagtttcttagctaactttgctatcctacaacataaagcaactctcatgcataaaaaactaattaaaaggaattggctttccagagggactttgagaccaatgtcagccaatctgtcacttttcaaaataaaattatggaactatgtagagctctattttcataatgttagatcaagtctttgctcaaattctatattttcagagaagacctcccatccctgcactgcctacttccctcctctggttttctcttcttcatagcattcatcgccttctaatatacaatgtaatttactacttgtcttgaatgtcagctccacagaggaaggacgtttgtctagcgattgttgtgttctcagcatgtaaagtgtctggcaaggtagtagacattcagtaaaacattgttgaatgaataaatgtgtggtgggacataaggcatcaattaaatccaataagttggtgatggcgaggggcaagaatgaatttttgagagaaacaaaggtgcttaagatacaacccctcttcctaaagatgatcacctagcgagggacacaagcgtacaaagaattacactcaaaggctaagcaggacacgggcagtagacacaagacaattcaccagtgagccttgacctgcagaactttgaaagcaaaggacacagaagctgaatgttacgcagacccaagagtgtatcccctatggccaaggagaagaagggcaacctcgctgtgaacattgcaacctatgagggtcggagcagggcagagggcgttgcgtataaactgcctctcatttatcctcaagcctgattacctaagtgaactgttatgttttcttctttctacctggaatcctcttaaaccagaggcagatttgacctaagaagtatgcaatttagttgcgtctacatgacccaatatggaaggaagttttggcaaacacccagttaatctagtcagtatgaattgctattccacatgaggctggctcaaaaatcccactttgaggccttatcaaaataaataggtcatttagacatctgtgtcacttagacacagagcctgtgggagaaatgaaatagaagaaggtcccaggttcagcagggagcctcacgtggccatggcaaggctgtgcccagagaatgtgccacttcactctccacgcttttcatatttaaaagtcagctatttcttccaagccttttcctcgtaggtctttttttccctttgcccatctaatatcttcaacagtacctccattatgctccacacagcagggtcagctccgaggcagaggggctgttggattccaggacaagatccttgagcaaaggaaacctgatccaggatgttttttccctgtgagttccaagtttggggaaagcgttccctggatattttcctccttccaaggtctcagtggatgccaagctcctctgttgctctttgggatgtaagacgccgctgaagtgaaggtttaatagcccctctagaatggtgggatgtagtgaggacttggtcctgagcttcaaggccaggtggccagtgactctggcacctgacagtgggggaggaaggaggatgctgggtaatgcctgggcctaacagccaggcagaccacctgtagccatcagccctctctgtcttctgggatggggtttctcaaaccagggtccaggataataatccacctcttcttttaaaagaaagccacgatttattttattatattattattattattattattttttttttttttttgctttggagacaggatctcactttgtcacccaggctggagtacaatagtgtaatcatagctcactgcagccttaaactcctggcctcaagtgttcctcccaccttggcctcccaaagtgctgggattacagccctgagccaccacacccagcctgagagccaagctttatttaaatttgggaatcactgttccaggagcacaggaataaaactgtccttcatcctttatagccctcaggcttctcttccttttcaaggccttcctcaatgggcttggtaatctcatctcaccaagataagcatggtagaggggcaagcaggatggaatagactccatgtatatggtgtgtatttttaaaatcaccatttatcacatgcttatttaatcctcatagcaaccgtagaaagcacctgttattaatgcttttcagagaagcagaactggaggttcaaagcagctgagcaacatgaccaaggtcactccacaaggccaatggcggagctgggatttgaatcccgggttaactgattcgaagtcctatctcctaactgccaaaataatccccaggcccaccagagagaaaggataccttcgtgatgacatcctaagccctgcatctactttgcctcagggtggggctgagagcgcggactcgagcaaagactgcagcagatgagaagctggtcctgagctgtgggttgggaaggttcgggcagtgcagcagttctcacaggtggagagcaggatgaaggaacgcttagaggagagcagcttctgcaggttggtggctgggagaggctgctcctccccaaagactggacctattagaagcacaggacctctgatggagatggggttttagaggatttcctagtccagccctctaccagtacacgtcataacctgtcggacagcccaacaacaaagaccgccgctcacctgcagtttcttccctgtcggagtctgggagtgaatcttcctcctcgtgggcttggctctcttgggaagttgagggctttgggtctcaggtctgccattgatttgagcatttctcctgtgcatcctcactctttcaagaaaggaggtctggatctggctaccaaatccccctgctctgctgggagcatgagcagccttgcccattgctcggctgaaaggtctgcattcagaagccaggctttccaaggataaacagggttaggtgctgccagccttcttagcagcaaccagaaattcaatgagaagtttcagggaaaattcatctttttccacccagtcattgagagcaaggttttatgacacagaggatgaagagagaggcttttgtgggctgatgtcgctgtgttgctggcctccggtcaggtcacaaggtggagcgctgcatgccggcagggacgtttgggctttcagacagcagaggcatcagagcagaagcaaatatcttcccaaagatgtttggccatatttctaggaccaggttaaaagcttcacacagaagctaagttaacattggtatgtctatgagagggtcatgtccagaaacagctttcgccttccaacagagactttgcggaaaaaaatctccatgctcatatttctctacctcaggaggctctcctggaatctaagaggccatttagtgtcaaattcagccccactaagcatcacataatggtgatactgttaaggacatcatatatgtgaggctgaattatccacaatggctggcaatgtcttcattctccagactgaggctccggcctctttgctttggcaagagttgatctcaggactgcctgaaaccagaaactccaggcaaagctctttgggtcactcttctgaaaaggaatcacaataataagatctgttatcttggtactctgtaaagccaaggtgtcagccttcacgacagtgaaaagttagtttgtcagaaccagggtgtgattgtctgctgattaagccatctgccaccacagaaacagaccaagatcatcaactggtacactggtgccgacggccacatttttacacactgggcctttggctgccacctcaagtttgtcagttctcaggaggcagactccaggcaccacattcgagagggcctccatgcacgctcaggcttcttctcatagcaggcacaccctgcctgagccccactccatgcgctgacggagagtcggggcaggagctctcatgcagccaggtgttgggctctgcaagggggtttgtgtggggatgtgagccactgggtcagctccctggttcaggcttctgcattcaggttatagacatatctctgtgtgtatgttggggactagagatgaccacactgctaaattcttcttgagtgacttttagtaggaaaaaaatatgaaccctcacttcaacaatgacattgttaaaaacacataaaatgcacaccacttcaccgagcagcattcaggccttgacttccctgtgggaacaagcttttagcctatgcctcatacataaataggtggattgtggtccactcagaggggacacaggagtgatgtagtctgtacccctcaacaccccagatggaaatcttttgcctggaggcttaatttcgtgaagaagtcagggtaggagcactgggttctcttcagctagtgatatcatgaacaataagaagaattgtgtgtatgtagcaagtaggagaaaatattggccaagtttattcattcaacaaatacttagagtctactaactctgtgtggggccctgttctaagtgcttggatgtatcagagaacacaacagagatccctactcttatggacctgatgttcaggagggagggggatatgaaccataaacgacaaatacaaattaattactgattaaattatgtgataagtgaaaatggaagagcagaggaaggaggatgagggagttgcggggaggagggaattaatgtggatttggaaggctgcccaacatgtttctgggtctgaatatttttggtctgtgacacaaatcgtattcttgattgctaacatccactgaggccacctctgtgctgggcactatgctgggtgtttacttgggtatctcatttactctgcaaggctggcctggttcttcatacccctagggcagaatgcaagactttagttcttggccttctgcatcttcatgctttttctttggagcagaaattgctctgaaaatgctgggtttaacttaaatcttacattgaccagacgtctcctcgagccccagagcctacggagtgcttttgttaaaccccagagccaatgtgctcaggctgtcctttgtgcagccaggtaccagtgggaagattttccatgcaaatacttgggaataaaaaagaaatgagagggaggcctgtggtctttgctactctgactccacaggctgctgggatggacgttggatgaagacaccagcttagggcatggcctgttgctatttatgactctattacttcacagtgagagcacagttcaggctgactgctgggtggcctctgtgtttctgtcacttcctttttcacctatgtgaggactgtagcattgattgggacttccaaagtcctgttagccaagcttctgccatcagatgggcctgtgggcacattgccccataaaactctgcctccttcctaaggccctggggcaccacagaaagatgggcctgccaagccactgctctgataaggcatgcctttaaccaggctccatcactcagagctacaggaaaatcccatggtcatccgccctctgttggtgacagggaattccatcatgcattcagatttttgcatgcctgctctgtccctggaactagaataagagaatagggagaaaagccgataagaagtcaacgataactatagccatggccataatttgggctccaaaagaaataattctgagtggttaccagatagctttcagagagggttgaagccttcagtagactaatgattgagcagaaaaaaatgtttagaaaacttgagacagattttatccatgcagtaagtcagaagtcaagtcagaagttcagatgacatgtacgattcctggaatttagtgattttttgtttgaatgtgttacttctcttctactttctgttctgctcccactagaattatctccttcccccaggccctcagatccaccccacataccacaagctcattcttcaccacaccctgttttctagcatggctgcaagcgcaaaacctcccttagttcccacctgcaacgccaaggtcccagagtttgctgagctaccatcagcaagaccttgaacatgcctcggccctctctcctctccctccacattgctctacttcagtggtacagctcctcccatggctgtctctagacctcaccttgacatctcaccacccacctctgccttgttcctacctgatgcactctcccctctccaaagagtcacctggccctagttccactcacctctctgtcaacctccaggaaccctttatgtgtcctccatgccttaggcacatgacccgtgtttcctcacaatcacagttaccctctcatactcacatgcaaggacgaggaacttgtttcctattacttcacacccactccctggccatgcacacaatacagtgcagaagttggtcccaaatctattaccagaggcctaagcagcagcctcctcctgctcaaagaaaaatgttctgccgctgccaacattgcacttcctctgcaagacatctcagaaaatgcccatcagagccttccacctcattccaagcttgcaagcaagctggtctttcatttgtcttgtttgtttttaagcaagaagaatccctttagaggaggaattaggaaagaaaaaaaagtcaaacagaaacagaaggagtggaggtttgtctctctcttttgtcccctgccttgcccttcctccctatcccatccccctcactttctgtgttgcttttcatgccagttgctaaagactgtaattttaaaactgaacgggcttttccagagccttgaggaatgtgcatctgcacgtggatttttccacaaaaaaagtgtccctgtcttttggatcttcttagccagaaacaatgaggccaggcaatcagagtccatccgtcttcccaactcttattctaatttgtttgagaggctcagaaggggctgaagggcatggttgtgtttcaccccgtcagactctgttgtttgatgaggtttgtgctccatttgttcggatggtttttatggtttctttgttgttcatggaataactttgaaggtcataattctgtatcctcaagctcctctgctattcctgctcaatgtctcaatgggactcataccaagagaaagggaaggaagaagtttccagctagttagttaagcaatttctcaacacatttatggaagcatgtggaatctttcaagaaaggggttacgatcacaaaagttcgatttgaggagtattctccaagacaactgagaagcaagcccttagtcatgcccaggtggggagcaggtctccaacctctcatttcctgatccagcccctttcccagccacatttctggcctcttccctttctctgtggtcatcagcccagccctctccactatcaatagaaaagcccgagagccctcagagagcctggaatgtgctcccaccgctgtgatgtcatcccacatcatccatgtgctgaaatcagggactggagtcggcccccaggaatgtcatggccatgggctttgagacactcttcttatgggcctttcacccaatccagaccttgcctgctcttcagagctgcttgaaggattttgctacagaactatggacatttaagaaatgtctaaccttgtgtcagtttatatttgtagaacgcttcataaggtgcttttccatatgttatctcatctgatcatttccacaaccccataaggtagataaaacataaatttttatttccgtattaaaattgaagcccagaggagacttttgattcatcccaggtttcacaacaaagagtgtcaggaagagaacttgaaccaatcctctgacttcacattcagggttcttcccattactttggctcccagataagactacaatcttctgaaagtcagagtgttaatattccaaccccagggggtgagtacacttccagaatttagggatgctttaaaagccattgctgaattgaattttatttctcctgatcactacagataatgctcatgcaacttttctgagaagcaggcgatgctaatgtacccctatttgttattgttcattagacccttcttatgactcagtcagaagaggagcttggggcaataacatgaattctggcctcaacaaaagtaagtaaatgttttatagttctttggaggaaagcatgtttctgaggacaggattggagaacaggatcatgagacacaggagagcagcaagcatttgtttccctgctttttgagtagacatcaaaattatttgccaatttagggcctttccatgataccagtccttgaaagatgatatgggattttcgtttagatttttgagttttgttttattgcgctcggttttagaacatgggaaatttgaaggttttcttgagacaaggttctgtaccaatgaatggtcactgtcactgggttttgcttttgttatttaaatcaagataatgactcgctataattttgctcccgtaactgttgaggctaagtcgtaccaatttccccattccccttgatactgggtagatttcctcatatcatcatctcaccacttggtggagaaattgatgtctcagaaccctgccatctcctcaacaggttatcttctgtccctgatgaggagatgccggggggtctgggacatcaggttctccaccaagtggtgagatgatgacatgtcgaagtctacccaatatcccccagtaagagaataaggggcaagaatgactcatgaactcctgtaccagaaatcaaacttgccatgcctaggaagcaaaatatgaagcacatgaacaggtggtaaagggaattctttcaagaaagaggttggggttacaaattaatgcccaaacaataaccaagaccccttccaattatgtgtattaattatttacttactctgcacatgacatttggcaatataagattcacaaagatgaatcagacatgcactggtctcataagcgggagagagaaatcaagcacacacagaactcctttcttctggttggtatcaaggaaggctttgtggacctggtagcacttgagttagctctggaaggagaggcaggatttggacctgtggcgatatgggctggggaagacatgagcttggcatgtctgacagtcagtgaggacctcaggttcctggagcttaggatgtgtgatgcagaagaagtctggaaaggtaagaaacagaattgtaaatgatgctatgaagatatgccttagttctttaggcaatgaagagtcactaaggttttgaacactggcgtgtatggtgggttgtggggagacagaagagtaatgaggacaccagtcagactaagccagaaaccatgcaagaagcaatacagatctgtgatgcagaagtgatcatgggaatggaaggggtgtgtgagagataccaaggaggaaactcacaagacagggacaccaggaagcagctgatctttgctcagatgtcactttctcagtaaggacttctctaactttccgatttgaaaatgaaatccacagcctcagtaccatcagtgatgctatactgttagtttactttttaaaaatttgaaaatgaaaaggtgacatttaagcaaagacaaaattttaagaatttaaaaatgtgtttattattgtctctcccattggaatgcgagttctaccaggaactgcttgttcattcctgaatctccagcctggagaacagggccagcacatagtagattctaggtaaatgtttctaaaataagatgaataaatgagtcagtggagagtgggcgaaggaatgagtgagaaagcacatctgtcaagacgtcttgctcccctcggggagctgggtcctactcactgcatttctttccctcttgccacaggtcctccccttggaggggcacaaacgatcagtaagaatacagagcaacggccccagccaggtacctgcccaggatatgtaatctctcctttgcttcctgcacagttgttgatttcacatggtcaactgatggagggtttaaacaatataccacatatgttttctcttatttctctcaaagagggtctatctttgaccctaatagtcctgtgaatgaagtaacaggtactgacatcaagtagagacttgttaaatatcaaaggtgaaagaacttgaagatgaactattccaatgctttattttgttcaataaagaaactgaggcccggggaggtgaagtgacttgctaaaaaccatacagctggttaatgaaagaaatagggctacaatcccagatcccccaaattcctgtccaagccttttatgcttcaccaaaccttactttcagaaatatccccatcctgtgatgagttggcttaacaattaaggcagaggaactttgaaagccatggacctggagactccgtattggagaggaacttggagatttctgggtctatcctaccctcacctctaccttacttgtgcttgtagtaaaacagggcgttgactttctagctgggctcagttccactatctgacccaaagtctgcctcctggaatttccactcaagcttttccttctggagaagccttcctcctgcttcctccgaaatcctttgcatatctgaagacagctgctgtgcccaagccccagctcctctctctatcttcttatgtgatgcagctgagatgaagttctgaacaagtcatttgctttggggtaggcaaacattgttccccatctccacagaaggcagagcaagagaaaatcaactgacatttcacctggaaggttaagaaaaaatttgctgactgtggatcataagtcagatgtagagagttttaaagactgtccaataacaacaaaattatgcattagtcatcacctgccaaaaataattatcatattaatgatgtggatgagaaaagatggtctcaatgggcttaaggacttttgaaggtaatttatggttctaagtagaaacccaaaaatcatagtgatatttttaaaactgcaattatagttgaaaaatagcaaaattttacaaaatacatgacaattttgccaagtcgagacccagctctctaccatgatttcctcaactaacaaaaaaggagataaacctctcacctaaaccagtattgcaaagactttttcatggctaaataaacacatacgttttgaggaaagtgagattttaagaatagtcattttatagctaaaatgtacactctggtttgtgctgacatttctggcttgtgtgacatttcaaatcacagagtgttatactagaagaaaactgaggaatccagtagcccaacccactcatttgtcagatgagaaaactgattcccagaaattgtccaacaagttatttgtttatcacatagctgctgctaaaacccaggctgcttggtttctaggcatgtgtttttcatgctacattcaaaaaaaaaacagattaataatgttgttagtattaggtagagttattaaagaccagtaaccatgagacctgctttaagcccatggagtcagctgtccgttgtatcattgaatattatccagttcctttccaaatgttttctttgttttgctttgggtaatgacaacataatctgcacattttagatgccaaaataagaaaaagtaatcctgttcctattctttgttctttctgtaattattgagatgaagaccacaaatgtcatcaagatctttgagatctgcaaataaaagcagtaaagttttctgaaatcagtctttcctgtgatcttgaaataaaagtataaacccttatggttttcttatggttggtacggttgtcatattttttaaaaacactgaagcaaatttccttttttatttccttagatccgtatcagatcctgggcccgaccagcagtcgcctagccaaccctggtgagtttaccttggcctgcaagccttttttgccagaatgtttcgtagctttgtgaaatcacagagacttctgtcctaagtccagacacctgagtggggagtaacatgcacctctttccttgaaatgttcaatgtctgtttctggagcatgtgaacaacaggtcagggcttgttatgaggtgtcaaggttggttagctgaggatacttctaggaataaacacatcagcactgcacatgtgcacttaggtgtagatgagtaataagtggcacaggtaggtaggcgtttcaatcagagaaaatgggcaagaaagagaagaagacaactccactcagctctcagttgtctcccacatgccaggcacaagttcataaatattccaaagggttttatttgtgattttagaaagtgttgccaagttatctggccttataaaagagatgtgtcctggaaaagttgcagatatagtcaatttgaccttgtactttaaagatttagtatcaaaaataactctcaagagggtccttctaaaccaagtccatcgagattgggagctagcaggcccttgtcgcagtgtggcccactcaccttcccatcccagggactctgcctacccattccttagtgcctggtcattactgccagaggagaaagcagccacccagcatattctgggtatttttctctctgcacaagttctctgtagaacttagagctgcaagccaagctctgggcctgccaagggccaatccaggtcctgtccatccaaaagctaaagctcatggcgcagcttctcccaatgactcccacagtcatgccttgcccctgactttttattgctgacagggaattccctgggggacatgaccactaattagagatcagtcagtgattcaggcctttctagatgaagagattcaaaagccttgccaaagggattgaggggggatatggctcacccaagatcacacagctagttctgggcagagtttgcacctcacttcccacattccatttaccaggccttggggcaaagcatcttaggatctaacctcgcttattatacccatctccaaggcaagcagaaaggcaaatcaacaatgacataagaagggcttgtcaagtcgatcccaatgtcgaaggaaacaaaaggtttctttaaaaggatgagaagctccctgcatttagggaactgggttctgccttctctgggctgaggtgttctgttctctcccgtttgcctcacggcgtgcaggaagcgggcagatccagctgtggcaattcctcctggagctgctctccgacagcgccaacgccagctgtatcacctgggaggggaccaacggggagttcaaaatgacggaccccgatgaggtggccaggcgctggggcgagcggaaaagcaagcccaacatgaattacgacaagctgagccgggccctccgttattactatgataaaaacattatgaccaaagtgcacggcaaaagatatgcttacaaatttgacttccacggcattgcccaggctctgcagccacatccgaccgagtcgtccatgtacaagtacccttctgacatctcctacatgccttcctaccatgcccaccagcagaaggtgaactttgtccctccccatccatcctccatgcctgtcacttcctccagcttctttggagccgcatcacaatactggacctcccccacggggggaatctaccccaaccccaacgtcccccgccatcctaacacccacgtgccttcacacttaggcagctactactagaagcttactcatcagtggccttctagctgaagcccatcctgcacacttactggatgctttggactcaacaggacatatgtggccttgaagggaagacaaaactggatgttctttcttgttggatagaacctttgtatttgttctttaaaaacattttttttaatgttggtaacttttgcttcctctacctgaacaaagagatgaataattccatgggccagtatgccagtttgaattctcagtctcctagcatcttgtgagttgcatattaagattactggaatggttaagtcatggttctgagaaagaagctgtacgttttctttatgtttttatgaccaaagcagtttcttgtcaatacacggggttcagtatgacacagaatcatggacttaacccgtcatgttctggtttgagatttagtgacaaatagaggtgggaagcttataatctaattttaggaggaccaaattcagtggatggcaactggaacattgattgtaaggccagtgaagttttcacccaactggaatttgatggaaagaaggtttgtgtgtttaagacgccaagggcattgcagaatccctctcagtggacagtatgcactcagctgaccactctctctagaaatagtcaagatatgaactaagaaattttaatgcaaatacatacattcctgaaagacggggaattaaattactaatttttttttttttttaaatgatgacagtggtcccagaacttggaaaagttgtagggatttctaaactcaagcagattcgcaagtgctgtgcgcttgtcagaccatcagaccagggccaaccaatcagaaggcaacttactgtataaattatgcagagttattttcctatatctcacagtattaaaaataaataattaaaaattaagaataaataaacgagttgacctcggtcacaaaagcagttttactatcgaatcaatcgctgttattttttttaatgtaatttgtacatcttttttcaatctgtacatttgggctgtctgtatgtttttatagctggtttttaaaaagcataatatgcctatagctgaaaaggaaacagggctgtttaagtcactgacttatgagaaagcaaagcactggtacagttatttaacaggcatacacaagcagggaaaagataatccatttagatctttaatgctttggaaatgcgtgtaacagtactgcaataatcacagctctgggaaaaacaacgaaactttcccttgtggagaggagggattttcctgctctatataagcaacatatttttagacattaaaatatatataattttgcaggtaattgttgacttttttaactatattaagtgttaagctgacaactgtcaaagaagaccatgttgtaaaataatttgactaaataaatggttccttctctcagtgctgaggacagttttcttatttaccgcccccgttaggtcaaagggttttccctggggaactttcctatttacttcttgcactatcaagaatttttcgaatgtacctactgcagtacagcagaaggtaaaaaatcagtgtggtttttcattgttgttgatgatgtttgtagtgtttttgtgtgtgttatttaaatcttcctccagcctaaaagggttttataaaacagcagctaaggccatggataaacctgtatgtaaggactggagcaaagcgagctggtctatccagacttgtctgtgagatttaactctgcagcctcccctgggcacttcagacccagacggccaccttctgccactccagcaaagaataagcgccctgcttccttcaggtctcagaccaggactttatggctcatgcagatttttaaggtcatttttcttcccaaggaagaaacttgcctccagttccttcactgttaggtagcttattttcattttctctattttacaatgaaaagagtgagacctgggaagtccttgatttgcaaggaattagactcacagcattggtaaccctagaaccttcttagggtaacactaagtaccttctagacaacatgtctacctaaatgaaatgggatgtgtttcggaacatttgtctccagtttttttttaatcttgcaccctgccatttaaaaagatgtgtaaagcacatattctcaacatatgcacattgatttataaatcatatatacaaactgttacattattcttcatattagaaaacaaatacaaaatagaacattttaaatggtgatataaaaataaattgaaactgaaattctactcttttcctcctattttctctatattgaatatcctctgctattaactctcaaaacaaagatgttggtctttagtgaaaaaagtgtatgcatgtactggatttctagtgacttccaagaaaggagaaaattaaaacttggtattagtggcccaagcatagaaagaggaatgatgaaggccaggtatgtttaagaacaaactagctgaattctttggcagatctccatcttagccacgcaatttccccatcaattttgaaatctgcaaagtattcattagggaaaatggaggcatatatttctgagtgctgtaagaagatgctcagcccattagttcattcttttaaaggttttctttatgtgtcctactcaaacactggctcaggctcatcttctctacacagtcatagagctttagccaaatctcgccccctgaatatgttccacagtgatttgtcctatgcctcagaagctggcccactggctgacaggactggggcaccattttctcctcataagcatttgtacagagggggcactggcatttattcccctgcaatgcccagattgaacgtttgctagctggctccagggcatgaagcggactagtcccagaggacaaacagaatctttgccctcctgtctgctagtccagtcttttccctgctggatcattgtgtgcctgtgccatgaggtttctgccatctaacaaacagtgccagccaagcaaagcgggcatgcaggcctgcaagtggttctcatggaagctgttcctccccacagtttgggacactgaccaacagtcctttagcaggaggtcgtcttagtccatttggtctgctataacaaactaccatagactgggtggctcataaaaacaggactttatttctcacagttctggaggctgggaagtccaagatcaaggtgccagcagattcagtgtctggtgagggcccttgccttggtttatagagggaaccttctcactgtgtgctgatatggtgtaaggagcaagggaatgctctggggtctctttcataagggaattaatcccactcttgagtgctccaccctcatgccctaatcacctccaaataccttcacattggggattaggtttcagcatatgaatttgggagaagggacagacacagtcagtctatagcagaggtcatcttttttcagtgtcgaaaaatgttgttgagtcccacacaaaggaagttctattttattttattttattttattttattttattttattttattttattttatttctggagatagggtatctctatgttgcccaggcaggtctcaaactcctggcttcaagcaatccttccacctcaacctcccaaagtgttgggattactggcgtgagccaccacactgggcctattttcaatatctgttattttaaaacatttttaatagtcaacagccactagaaaacgtaatgacacttaaaaagattgttattttacttaaccaataacatctgcatgcaagtgagcgatgaacatacacaatgggaaatggattaagaggttctcagataaggtttgctagtttagaccaaatgagatcaggaggttctagaacacaagggaggaaagcagcatctgtccaccccaagccaagttactgccaacccaaggcaatgcttagtggataaataaaaaactgaacaaaatgcagtacttcatgtgagaggtggtttctgtggacttggattcttaccgtatttcctctaatatctgttcattacaagcaccatgtaaacctgttgccttaaaaactcttgaaaaggtgtcctttgggggaatgtgcttgggggaagcaacccttaagcatggctgtctgctgcccagccccactcccacaccttgctcagaagttcctccaccatcaacagcaccactgagcttgtgtccagaaggccctcaggaggtcgaggtaagaggatgctttgtatcagtgggggcagggatgggagaggtaataagagccgggatgggggccaggggagtgactgggttctggtgagcatacagaagctttgctgttattcaggaaggaatgcaggttttgcagaaagcacattgggcatttcatcacgtagaaagctactgaaactgacactacacgccttcagccagggagtcccgctaagggattatgaaaggccggctgattccaaaactacaaatcccaggctcccccgggggatggacacttgtgagaggaagtgggttagccagtcaaacctccagggtttcagccagttgagaaaggatagggagggaagttttaaaaggaatgtgggcccacaagcctgggatctgtctctctctctcagtctgatgcggcctcctgtctaattgtttcagtctgtccgagctggtaaatccctaagcacatagtcaatttacactcagcttaaaagctctagagggagacaggaaaaatttccagtgagaccactcactcacctacaactgctagattaaccttctgcattttaactgagttaactcatatgttttcttagtgggaggaaagaggcaatttgagtagacaaatgaaaatgaatataatgccagaaaccctgggttcaaatgctggcccttccacctactgggtaacttgtcttcatcgattaactaggacctgagttatacctcctgcatgagtttctgtgaggcatcggacgacagtgtggaaaacccattgtagactgctgtacaggaggtttatggataatcatcgttgtctgctagtattggctagtatttttcaagaacattcattaagtccttggtagctggtgggcaccctgtttggggagttcagtgcagggtcatttttgttttgtggtcagaaagacattttccaaatgggtgcaaagtagaaataagttgggttttccagagagcctttgcattttccccatccacggccctcccattgccccacttgggcttttgcccttccttggctctatgtgtgcacctaaagccaggggagcgtgtggccaagctgcaggatgttgcaaataaaatgagattttataaaggaatgctaaaaatgtgctttgacagcaatgttggatgggatttttcaatcggctaagaaatagaggttgggagctgggattttatgcccggcaagctcggagcttgatttttccatctataaaatgaggatgatttaataactatacaagagtatcactggagttaagtaagatagtgtacataaaaatgctctgtatgttgaaaagaactaggaaactgcaagatttcctaggtattattgccaaggtcttactgtcttcatcgagaggcaactcctctttaccttcaaaactctgtacaggtctctgttcctctctgatctaagatagagtgaagccacactattctattctattctattctgtattgtgaatatacattgtgattttttaaaaaactgtaaaatcttgaaatagtcacaaacttccagaaaagttagaacagtacgacgaacaatttttagtgaatcatttaagagaaatttgccaaccatgcttcatcaaccccaaatgcttaagggtatatttcatttaaacaacaaccttttcctacatagtccagtataatcaagagaatcgaataactaatgcaagcggattactcctatgtaatcccgaggcaccatgcactgttggctgattgtcaccactgcagtcttttggagcaaaaggttcccattctaaaacactgattgtgtatagttgtcatctaccattagtctccctcggtctttcaggtctgtgacaattttgaatatgacaggtcaggtattctgtagaatgttccccaatttgggattgctggtatctcttcgcgattggattgagccaaggcttttctgagaggaccatcgcagaagtcatgctgccttcctctcctgtattccattgcgtggtacatcatttcaacgtatcccgttattgatgaagttcactctttgtttaaggtggtgcctcccagccttctcctttgaaaagttattcctttaccctttgtaattaataagtattttgcggaggtttactttcaaaatatgtaaatatcccattcaacatcaaatttcaaagtattcattcatttatttatatctctaagactcatggctctctattttattgagtggatatgatctgttctttaaagattacattgtcccaatggaaggatattcacgctggcttctgtctcctttgacatgttcccatcagtctttaagtgcttccttactttctcgcacaacaacttattttggagtttctgccctagccctggaattagtcatctcctcatggattcctagttctttttagtggaaaatgctatttagaacccaatacctgggggatagatgtgccaattgctaatggggtgtccctgctcccaggctccctcagtgtacagagccaagcaatagacgtagatacatacatacacatatattatgtatgtatgtatgtgactatatgcactcacgtacatacatacatatacagtcatgccttgcttaataacggggatacattctggaaaatgtgtccttaggtgattttacggttgtgaatatcatagagtgtacttcacacacctagatggaacagcctatgacacacctaggctacatggtacagcctattgctccgaggctacaaacatgcacggcatgttactctactgaatactgtaggtgactgtaatacaatgggaagtatttgtgtatctaaacatggaaaaggtacagtaaaaataggataaaagttaaaaaatggtacacctgtatagggcacttaccatgaatggagcttgcaggactgcaaattaatctaggtgagtcagtgagtgagtggtgagtgaatgtgaaggcctaggacataactgcacaccactgcagactctgtcaacattgtacactcaggctacgctaaatctacaaaaccttttcctttcttcaataataaattaaccttagcttaccgtaattctttataaagttctaaattttttaactcttttactctttggtaataacatttaacttaaaacacaaacacattgtacagtataaaaatatcttcatatccttattctatacactgtttttatttaaaaaaatatttcgttttactccttgaaatttttgttagaaatgaagacatgaattcatatttagcctataacctgcctgaggctgttttacagttaactttctaaacatgtaagtaggcattatctacgtatatctaaaatctatcattctaaaataatgataaaaatctatcattttaaagtaatgatacataaacagtaacatagttgtttactatcattatcaagaattacgtactctacacctgctagactttcatagaccgtcagggaagtaggtttgttcacatcagcgtcaccacagacatgaagattgcattgcacttccacagggcatgagcaccgatgtcactgggtgatgggaattcttcacctcctttatagccttgtggcaccaccattgcatatggggtctttcacggacctaaacatctttatgcagtgcatgactgtatatgcttatacatttatatctatatttatttctgctatctatatgactatgcatatacatctatttctgtatttatttctactacctatctatattgaaaccctgagttcactcagaagcattcatttctaatccaacactggatgttgattccccttttgtgtctgtaattcctttatttgacagtgaaaagaatggtttccattagacatcctataagcccttccttgtcaatccttctgcatgcacccggtcttccatctctgctgcacccctcacctccatgcaacgtgttcatctccctgcattggccctaaactcccatccaggccaccccactgcatgggcaccctcctcaccccaccccaggcagtgcctctgtgtggatgttgttctcaccctgttcaagctctgatgccccaacccaggcaacgcctccacaggcaaaccctcctcaaccagctgtagccctgacagccaggacaggctgcacgccctgcgtcccatgctctctttactccacttgggcactaacacttcccatcaggacgcgccacacggaagcccttctcaccccgttcaggctctgatatcactaccccctgacacctgccttgctgtgctgcacccatggctcctggagtcaagacttcagtgggagggggaggaagagggaaggaaggggaaggaagaagggaagatgcgtgcttacacatttacaacagcacatatctcattgggtgtgtgtatgtgttgcccatgcatggcaaaaagggaccacaagatccattaaactgtagttttgcctgcttccatattctctctctcacacacacacacacacacacacacacacacacacacgcacacacccttgtgccttttgagatgcagaatctggcaagcagttagagaaaggagagaaagagatgaaggagtagttaaccagagaggctaacaagataataataaggaacgaggcacagacaagtggagaaaatgaaatgttaaaatcttgttttaggtgtgcaggggagaaattggaagtgtggctggtaaggatgaaaaagcaatgttctgggttataacgttaatgtttttgatagaggctggggtgaagaatgcatggctttttaattatttttggttgttgtgttctgtcaagagagagtaatacaagaccccaggatctatttgtatctgaagtctgtgtcctccattagacaataagggaatgaagggcagaaactttgtctaactctttctttataagccagtgcctggcttctagaaagatccagaacatgtctatttgtcaaactacacctactggacaaaacgtgtccaaacccaatacagctgcccagaaattctgagggaagcatgagctgtccgttctgctcagttactgttaattccggaaatacacagagaaaataaaaatcacggaagatgcagttaaagtatggagctagaccactgttaaaacttgccagcaatttttaccaatccaatctttggtgttaattggtttccccagaagatgcaatatctctttccccactgatgattatattgcccagagccgctggctttcagaaatgtttaatcaagcattgcatatattcaagcaatactttccagacacctcagcttttcttgacagcgttaccttccttcgctctttctttgtctcttttaggaacatcaaatcatccagtgattttctgcataactcaaagttttgtcatttagaaaaaaaatcataacagaacagataaccattaggaaaccaatttgcatcagacatccatttgagaagtttaaaatgtggggaatgcaaactctacccatagggacttagtctgtagggaagaaatatgaacttgccactaatttctgaaaagcaaaattaattcagttatagctagatctgccttcataaggatatttctgatgcttctcagcctgttccttttatactgaatatttacaaacttcagtgatcacctgatcagaatccaagacacaaaactcaaatgaatccaatttttcaagtggcttcaacccagcaaccaaatcatagggctgccatttgtgctcaaagccaacactccaaggttttgtgtagatgagaatgaagagggagaaggcgagaaaagaagccatttcctgccgggggcggtggctcatgcctggaattgcagcactttggtaggctgaggcgggtggatcacctaaggtcaggagttcaagaccagcctggccaacatggtgaaaccctgtctctactaaaaatacaaaaattagctaagcgtggtggtgcatgcctgtaatcccagctattcaggagattcaggaggcaaaggcaggaggatcgcttgaatccgggaggtggaggttgcagtgagccgagatggcaccattgtatgccagcctgggcgacagagtggacttggtctcaaaaaaaaataaaataaaataaaaaataaaggtgtttccatccccacaaagagctatgtcaccaaagacacaggcaccccctatgacgtcctgctcatttaggaaacccatattcctagaagatcaaagcccattacctctggggaagtttgtttaattccgggagggatattatgggcatttgtggagtttccagaaaactcaaaagagccataaaaatcgtatttacatacaacattcatctaggttaaatttctttgcaagaagtgtctaattctcaagagatcagctattcagcttgctgggagctaattacaaatggtcccttagctttgctcagtcaactggccaaaaggcaacggagaggaaattggagttaagacaactgcagttggtccctggagggagcctattctactgccagcattctggctaatcagaatggatacagatggacaagtatcctttatgcatgagggcctgctggttttcctgggcgag

SEQ ID NO: 197 - DNA, 2957 bp, Homo sapiens
gaattcccaaacgtgcacaggggagtgagggcagggcgctcgcagggggcacgcagggagggcccagggcgccagggaggccgcgccgggctaatccgaaggggctgcgaggtcaggctgtaaccgggtcaatgtgtggaatattggggggctcggctgcagacttggccaaatggacgggactattaaggaggctctgtcggtggtgagcgacgaccagtccctctttgactcagcgtacggagcggcagcccatctccccaaggccgacatgactgcctcggggagtcctgactacgggcagccccacaagatcaaccccctcccaccacagcaggagtggatcaatcagccagtgagggtcaacgtcaagcgggagtatgaccacatgaatggatccagggagtctccggtggactgcagcgttagcaaatgcagcaagctggtgggcggaggcgagtccaaccccatgaactacaacagctatatggacgagaagaatggcccccctcctcccaacatgaccaccaacgagaggagagtcatcgtccccgcagaccccacactgtggacacaggagcatgtgaggcaatggctggagtgggccataaaggagtacagcttgatggagatcgacacatcctttttccagaacatggatggcaaggaactgtgtaaaatgaacaaggaggacttcctccgcgccaccaccctctacaacacggaagtgctgttgtcacacctcagttacctcagggaaagttcactgctggcctataatacaacctcccacaccgaccaatcctcacgattgagtgtcaaagaagacccttcttatgactcagtcagaagaggagcttggggcaataacatgaattctggcctcaacaaaagtcctccccttggaggggcacaaacgatcagtaagaatacagagcaacggccccagccagatccgtatcagatcctgggcccgaccagcagtcgcctagccaaccctggaagcgggcagatccagctgtggcaattcctcctggagctgctctccgacagcgccaacgccagctgtatcacctgggaggggaccaacggggagttcaaaatgacggaccccgatgaggtggccaggcgctggggcgagcggaaaagcaagcccaacatgaattacgacaagctgagccgggccctccgttattactatgataaaaacattatgaccaaagtgcacggcaaaagatatgcttacaaatttgacttccacggcattgcccaggctctgcagccacatccgaccgagtcgtccatgtacaagtacccttctgacatctcctacatgccttcctaccatgcccaccagcagaaggtgaactttgtccctccccatccatcctccatgcctgtcacttcctccagcttctttggagccgcatcacaatactggacctcccccacggggggaatctaccccaaccccaacgtcccccgccatcctaacacccacgtgccttcacacttaggcagctactactagaagcttcttctagctgaagcccatcctgcacacttactggatgctttggactcaacaggacatatgtggccttgaagggaagacaaaactggatgttctttcttgttggatagaacctttgtatttgttctttaaaaacattttttttaatgttggtaacttttgcttcctctacctgaacaaagagatgaataattccatgggccagtatgccagtttgaattctcagtctcctagcatcttgtgagttgcatattaagattactggaatggttaagtcatggttctgagaaagaagctgtacgttttctttatgtttttatgaccaaagcagtttcttgtcaatacacggggttcagtatgacacagaatcatggacttaacccgtcatgttctggtttgagatttagtgacaaatagaggtgggaagcttataatctaattttaggaggaccaaattcagcggatggcaactggaacattgattgtaaggccagtgaagttttcacccaactggaatttgatggaaagaaggtttgtgtgtttaagacgccaagggcattgcagaatccctctcagtggacagtatgcactcagctgaccactctctctagaaatagtcaagatatgaactaagaaattttaatgcaaatacatacattcctgaaagacggggaattaaattactaattttttttttttaaatgatgacagtggtcccagaacttggaaaagttgtagggatttctaaactcaagcagattcgcaagtgctgtgcgcttgtcagaccatcagaccagggccaaccaatcagaaggcaacttactgtataaattatgcagagttattttcctatatctcacagtattaaaaaataaataattaaaaattaagaataaataaacgagttgacctcggtcacaaaagcagttttactatcgaatcaatcgctgttatttttttttaatgtaatttgtacatcttttttcaatctgtacatttgggctgtcttgtatgtttttatgctcctttttaaaaagcataatatgcctatagctgaaaaggaaacagggctgtttaagtcactgacttatgagaaagcaaagcactggtacagttatttaacaggcatacacaagcagggaaaagataatccatttagatctttaatgctttggaaatgcgtgtaacagtactgcaataatcacagctctgggaaaaacaacgaaactttcccttgtggagaggagggattttcctgctctatataagcaacatatttttagacattaaaatatatataattttgcaggtaattgttgacttttttaactatattaagtgttaagctgacaactgtcaaagaagaccatgttgtaaaataatttgactaaataaatggttccttctctcaaaaaaaaaaaaa

SEQ ID NO: 198 - DNA, 1359 bp, Homo sapiens
atggacgggactattaaggaggctctgtcggtggtgagcgacgaccagtccctctttgactcagcgtacggagcggcagcccatctccccaaggccgacatgactgcctcggggagtcctgactacgggcagccccacaagatcaaccccctcccaccacagcaggagtggatcaatcagccagtgagggtcaacgtcaagcgggagtatgaccacatgaatggatccagggagtctccggtggactgcagcgttagcaaatgcagcaagctggtgggcggaggcgagtccaaccccatgaactacaacagctatatggacgagaagaatggcccccctcctcccaacatgaccaccaacgagaggagagtcatcgtccccgcagaccccacactgtggacacaggagcatgtgaggcaatggctggagtgggccataaaggagtacagcttgatggagatcgacacatcctttttccagaacatggatggcaaggaactgtgtaaaatgaacaaggaggacttcctccgcgccaccaccctctacaacacggaagtgctgttgtcacacctcagttacctcagggaaagttcactgctggcctataatacaacctcccacaccgaccaatcctcacgattgagtgtcaaagaagacccttcttatgactcagtcagaagaggagcttggggcaataacatgaattctggcctcaacaaaagtcctccccttggaggggcacaaacgatcagtaagaatacagagcaacggccccagccagatccgtatcagatcctgggcccgaccagcagtcgcctagccaaccctggaagcgggcagatccagctgtggcaattcctcctggagctgctctccgacagcgccaacgccagctgtatcacctgggaggggaccaacggggagttcaaaatgacggaccccgatgaggtggccaggcgctggggcgagcggaaaagcaagcccaacatgaattacgacaagctgagccgggccctccgttattactatgataaaaacattatgaccaaagtgcacggcaaaagatatgcttacaaatttgacttccacggcattgcccaggctctgcagccacatccgaccgagtcgtccatgtacaagtacccttctgacatctcctacatgccttcctaccatgcccaccagcagaaggtgaactttgtccctccccatccatcctccatgcctgtcacttcctccagcttctttggagccgcatcacaatactggacctcccccacggggggaatctaccccaaccccaacgtcccccgccatcctaacacccacgtgccttcacacttaggcagctactactag

SEQ ID NO: 199 - DNA, 41936 bp, Mus musculus
  misc_feature (18413)..(18496): "n" at positions 18413 to 18496 can be any base
  misc_feature (24424)..(24817): "n" at positions 24424 to 24817 can be any base
  misc_feature (34689)..(34721): "n" at positions 34689 to 34721 can be any base
agaatccaagaggacatgacaagtgcagtggaggaagagggggcagcttcctgtttagccaaagaagggatggagagtcggggggcgcacaaggcagaccaggagagacgaggttctgggatgtgacttgggagagaagaggtaaaaattaagctgtgttttactttgctttgttttttgtttttgtttttttctagaactaactttgcaatctcttgctgaagggccacctagacctcacccgatgatttccatttgtctgttttgacagctgtggtagccactggaacagttgatggtgcaagcgtcctcgatggtgtgagtgggtctcttgactcgtgtgcctgctcttgggactcttttcctcccgttgagttgtcatgtccaatttcaatatgatagcttttgcttccacttattatatttattttgtcatgcttggttgttatctcttagaagtgtattcttttctaatgagagacagaaacagagtgaatccagaaggaggggagttagggaagaactcggagcagcagaggaagaagaaactataatcagaatatattgtatgagaaaaggatctttcttttgtttttttctttttttgttttttgagacagggtttctctgtgtagccctggctgtcctggaactcactctgtagaccaggctggcctcgaactcagaaatctgcctgcctctgcctcccgagtgctggaattaaagacgtgcaccaccacgcccggcttatttttaataaaagaaaaaaagcagaaagaagtgggggggggccaaaagttaaaaacatgctctaatttattaacatggttcatggctctaaatctaaatttctttaggacattcatacttaagagaattcttcaaatggaaaggtcagccatacctactggtacaaacaataaagagaatttatgttctgtgggtatcctgaatccctgagagcatcccccaagcttggattgattagcagtgagcagagatcaccttaaatatttaggagatccaagtagttgactaaggtgtcttcctaaggcaggaaaggtagttaaggtttaaggttgaagttcatcacttacaagcaaaggccaaaagaaagatctcattatcttgtcaagtccacacgtgtataagactaggaaacagaaaataacggtgacttcaaacccagtgatgacgatatatggttcaggggcttgtcccacgatgaaaaagatcatagatgtcacagttaccacctagcagaagaaaacaaagacttagtcattgatcatacaatgggtttagttcctatggggaggttgggtgcatgtgtggtactgggggttggatccagggtctcaggtagtgagtgctgtaccatgaagttacacatatccctagcccccaaatgaggtctaaaaccaataagatttctgtcacacattgtagaaaggagaggcatggctaacgtgggtactgagtcctgcttgtggtttagaggactaagtgacctgttcaagtgcagctaatcactgcactgtgctctcaggtctgtcccctccaattgtctcctctccctctcggtctgccctcctcggccagctcatctcttcgtcttcctctaagacatctaggttgtcttctgtaaaacactcctcccaaagccctttcctttcacctcttccccagacaaatcctattctgttctgcttgtttgttggttttctgcttcttgctgcttctcaaaaacatctgcatcctggctgcctgaattcttcaccatccactccctcataactccttaacgctcagtaatctgcaatctcctattggacttcagttgaatgttgccgtgaggggcaagatgaaggggagggtgggagtggcagaggaggaggagatggatagaaacattgtcagaagcaaaaataaacctgtgtgcattttcatgtaagtcctcttactaaatacattgccattagaattaagggacagctgaagtctggaaacaacctaaatgacacccagaagtgaatggataaagagcatgtgatcagagctgggatgcagctcaatgattggtgtgagaggtcactaacttagcacatgtgatggcctttgttaattcccagaaacacatggacgtgcacatgcatacacataccacatacatacatgtatacacccacacacaaaaacatacatatacgcatgtacatacacacacacacatactcaagtgcatacatgcatgaaaggcaggggaataggtctatccataatggaatgttaggaacaaaaaatttgaagtattaatatggatatactattgacatatgacatcgatgactctcataattagatggatgaaagatgacaagatgagtatacatcatgctatttatagaaaattctaggaagtaaaaggtcatctgcagttacagaaaaagcttatttatacaaaacagaactaaattttatagaaaatatagttacagagagcacatgagtggacccctggggctagagtaggcaggaagaagggattatcgtggccatgaggaacattttaggggtttgggagccaatcatgtgccacttaacaaatagatccactctgggaaatacggtgagtgattttgtcgtgcaagttatcataaaaatacagatactaagatggcgctgatatcaccaggtgacatcgtctcatgggactgctgatatataagcaatcagcccatacctaagaaagtttgccaggcatgactgtattgattaccctgattatggtgataatttcattggttatatctgtgtccaattgatccaatgacacacacactggaaatgcaagtgtctttcccatcaactatggcaacacgaccttctaaaacataaatttgttcacatcctttgtctatttaaaattcaagtctacattttctctattatatagtccccctttcaccatgtgtcttgtatctcaaagtcagctaccatttactgtagcaaaaattcgcctctcaatttgtccatgaaaattccagtggtcacttcccaggcctcatttacttctgttccccctggtgtttaatgcagctgatcacagcctcaagtttcttcacttagcacccaggacaccctgacttatcttcttctacctccctaacaactccctcccactctttgcatgttctccctgccctgcctttactgctcacagactgctagagttcacacatccccttgtatcttctattaaatttctttcttcatgactccacccaccacttgactttcaatacgaccatctctcacccaaatccagctctatccagttcagtttcgctactcatggctctcacaggtatctctaatctactactgcattcaaagctgcctgctcctcctcccacacttgcttctcctgcagggcttctgataccagtgtgtcgcacctacactttttcatatgtgtaggcccctaaattcccaaataccaggactaaaggcaagtatcactgtgcctggtcaaaatgcaaaaatgttgactgctgtgtgtgacagctgacctttgatggtttaatgtgcacaaacttttgcttcatgtatgaaatcactaaaaacactgtctactaccccgcaggctatgtgtacgaggtatccataaaacgtaaatcaattctgtatttaaagtcgggttctatcttcgagatatctcattacacacttgtagatactccaaatatcctagacagtgctggtcttaagcatttgggataggaaatctgtagatccctgatctgactatttgctatttgctgcgcactcagtcacccgacccttgcttgcttggcgtgtcttgcagcgatgagctgtaaccctggtacattcccgcctcatttacttcacatcactggctttttctattcacaacgtattctcatcactagcactccgtctcacttaactctgaccgataccatcccagcaaagtctaaccccaagactacaatctgaaacctttgtcaaactcctcctcctcctcctcacgttccgttctctgccttttatttctcttatcccctagcacttaggcttaagatgccaggtaatgcactgggcttgactctgctgccctatctcccatcccaatatgtaaatgtcttgttcactgcggacagcaggcattcagtaagtgcttgttggatgagtacacgaagcaccaaacttcttattgttcagagcagagattcttaaggttttcttactagccttcattcacgtgggttcttttgggaaattttcttctggtatatgtctcgcttctgtatcctacctttatcctatcacatatagtacccctttgctttcatgtttgtgtcctggactaaatggaagcattctatgaggcaagaacttctgttctgtgcctggcatagaggtgcatgcatttaatcccagcccttgggaggcggaggcagatctctgagtttgaagccagcttgatctacagagtgagttccaggacagtcagggttacacagagaaaccctgtctcaaacaaacaaacaaacaaaccacaaaaacaaggggctggagagatggctcagtggttaagagcattgactgctcttccagaggtcctgagttcaattcccatcagccacacagtggctcacaaccatctgtaatgggatctgatgccctcttctggtgtgtctgaagacagctacagtatactcacattaaataaataaataaataaatctttaaacaacaacaataacaacaaaaccactaccacaccccccaaaaaaagaaagaaaaaagagaaattttgtggttggtgacatggctcagtcagtaaagcacttgttgaatagtataacactaatattaaaaacaacaacaaacaaacaaacaaagaaacaaaaacaaacaaaaagccaaagccggacatgatagaacaccctaactctgcctgttatccttgtaatcctaccattgtggagttggagactgtttgctggccagcctaacctaattggtaagcccaggccaatgagaaaccctgtctcaaaagccaatgtgggtggctcctgaagagtcacatattttggtgactaaatataaaagttttatgattcagggatttctgtcttggtaactaaatggaagaattctgtgagttaggaatccacttttgtcttggttgctctttcttccagctaccagcccagaagctggaacacattaaatagtcacatcgtgtacagctttgtgtctcaggtgtgcagcacccatggtggccagaagagggcatcctatctcctggagctggagttaaacagttggccaggagcaactcaacatgggtaccagaagttgaacactcgttctctgtcagggcagtagctgtggcactgagccattacccagtctctcacactgagtagagcggtaatatcagggctggagatttgactcagtggttaagggcatatattgctctggcagagggcttggatttgttttccagcatcccatggtggttcacaaccatccataactctgctgccaggagatctgatgccctcttttgaccttcaaaggcaccaaacactcgtgtggtgcatataaatacaggcaggcaaaacactctcacataaacggaatagatctaaaataaataaataaagcaagcaagcatctgggtggttgggtggtagagacagatgaaatgcttgtgagtttttcaagaccagccaaagacatgctatgcgaacctgttaaaacccaaatggggctggagagacagctcagcggttaagagcactgactgctcttccagaggtcccgagttcaatttttagcaaccagttggtgtggctcacaaccatctgtaatgggatctgctgccagcttgtggtgtgtctgaagacagctacagtgtactcacataaaataaataaatctttaaaaaaaacaacaacaacccaaaaccaaaaaaaaacaaaacagaacaaaaaacaagttatattaaacttaaactcctcccccctccccaactatctatctgtttcaatgttctggagctaatgtaaaactccaggtggccagtcaccttcttgattaaataaggcaaaggtaacctctccctctgctccagagtctttttctgaatgtctcatatgaatcataatttggagctacctctccgaatcacggatttctgacacggggaaggtttcctatgcaattaattttcctcattcacttgaagtttgaatctcctttacaacatcctctttagtgcccacccgtgccttctgtagtcagggaaatactgtcttctctggcggtcatttaagtttgtcgccccttcaatataataaactcttcgtgttatgtggaaacgttacccttggaacttttaaccatctcatttcagctctccaaattttttgaacggcttaacttttctttgagttttcttacattccttttaatatggtagttcagtgaaaaccagggcttttaggtatggttgaggagaaagttgtattgtaggtatgacggaggatacagtcagaggtatctggaagtggtcagattgaattgagccatgagaggagagggcaggggagagaggaagaggaagagagggggacggggagagggagagaatcaagaggaccaggagaggagagtgtgtgttgggggaagggggtggggtaccaagagagtctgcagagatggccagtttatatggaaatgagaagctgggagaagggaaatgaatcccagcctctgggctggagaggtttaaggtaggggcggggtgagaagttctgggaggagctacaggtacagagtgaacccagtccctggccgtttgtacttctctaacgagctgagaacattaccctttaataatgatctcctttctccaaagtgctgtccagaacagactgcaatgcccctgttagggcttggagccctaatacgggcagtttcctctttgctctcgctctgggttgtatccgctctaagttcggtaacatccaatgtccgacttacagtaaaagaccaccaacttaaaaaaaaaatcttaaaaaaatatttatgacttttgagtggtgagactatacagcgcctggtctggtagaggttatcaccaagttcgtaaaacaagtgaagggttttcggatagacccatgggcgtgtccctacatcatctgaaggaggaagccactctaccctatagttcttctccggtcgaactgagccacagagcaatcaatgccttgcgtctggaaaggcgtggctggaaaccaggtggccgagcaaacgctgctccaggcttccgaacccagtcttctctaccccggagcactcctgactaccgaccgccctgcattcccgccctggtcctcaccaaccgcaggaacttcacaaagcatttcagagtacagcagaagggccgacggcttacgaccggccgtggagtctccatcttgcccacagacccaacagtcacgcctctctttcaagccttctcgattaatggctctttccaggactcgcgccaccagctcaactgccggggctgggcctgcggcaccgcgctcaggccaagtccgggcgcgcctgcgcactagcgcgggccgcccactggctccgcctcctggtctcttaagttcctaactcttgctgacacctgtctagcctaacccaagccaggtccccaccactgctcctctgccctggagctttcctgtggagaagcactgttggagtaggcgagaaaaacccaagaatgccagcccagcctcttcgccatttgagcatctcaaatgccacctccttaggatttcccttggttaccttgtctagtcattcctcagcattttttttttttttttttttttttttagatcccatccagattacaagtataatatcccccaggaaaacgttgattcactggtagtaagttagacttaggcaagagaagttccgatgttctgttagtctggttgaccacggataatgaaaatgtatagttttatttaaaaactaaaaggctacaagaaaggaatttggccgttttcagcacagaaattattccgaagagacagacttatcctgatatgaatatcacacaatgtgcacatgtaataaaacatccaatggtatcttgtaaataaatacaattatgtatcagttaaaataaaaaatataaattctataaagcaaggatctgtctgcttctctgctcgaagggtccccatggtctgggccactcatcaatagctatagaatatatagcctgaacttatggcctggccctgttagtctgtccttgctctcagaacgtgcaagcctgtctctagagtacttttcgcctcccactgctgttagttgtcccacagtttataaagtgctccggtgtagccaggacaaaccatcttggagcatttcatgatgatagacacaggaagaatatgtcacttccattatgtgaattaagtctcatgatttcttttggagaactgaataaccacccgtcctagtttgcttctctgtgataaaacaaacactgaccaaaagcaatttgggggaagaaagggttatttggcttacaggagggaagacaaagtaggaactcaaggctggaaccggaggcagaagaagcagaagcagaagaactaagagtgtttatcagcttcagtagttctctggtttgctcattcataaagacccgcagctcacctgcccagggacagcattgcccatagcaaggaggcaaaaaacaaaaacaaaacaaaacaacaacaacaacaaaacccctccttcatcaattagcaacaggaatatgctccacagacatgcgcacaggccaatctgccgcagccagtttctcaattgaggctccctttcccgaggtgtttctagtttgtgttgccttggtaagaattaactagcccacaaccccagtccatttagatctctttggatcctgcccatctaagatctgttcatttggctgaatctgatcaacagttaccaacaatctcaccccaagacgctcacacacacacacacacacacacacacacacacacacacaactgtcgactttgaatttgaagattttatttgcctttactaggtgcctagcaaataaacaggaagccctgttagggtgatggcttttttgttacagatctaaaagagtaaaacaaaacccagaaaatgtctttcttcattttgcccaagacgactgccagcatcttgccacctggaagaagtggaaatcttctttacacgcattgtaactgcccatatacagtcaaggcggcaacatctgggcttattggtcttgaatgggtgaattatagtacccaagcttatttttgcttacaagttggccttacatgctttttttcttatcccttttttgttcattcaggggagatattcgttatgctttcccgaggaacattaaaatccaaacgttgaaaatgtcaaagactgtaacatttgggaacaatggctttcacggccctctcacctgtgtccctcacactgttttttgtgatggtggggattaaacctaggagggccctttgaagcccaaggacaagcttggaaaatgttcccaagtttgacaaggtctacttgcagagtattttcgaaggaaaatacaggacatcctgagtaggcggtgcgaggtgtggatggagccggcaaccaaggaagtaatcggatatactaagcagtccccggcattattatgccatccattctctaaatctacttgggtcagggccattctgcggtctgtaagtggggaaatcctcactttgaatctcttcggtgtagcctagagggagaaatactagcggatcccttaaggggcggggccggacaaggggtggggcggggctccaggacgcaccggaaggaagtaggacttgcacatcagccagggactatgctgctgcggtcgctgcgtagttgggctgcccggtccctgcgtagcgtgggcccggggagctccgggagccccgggagcctcgattcgggcgccgggccgctgtgggcacctcgccgcgcctggcctccgggtaactagtgcttttgtgccacctcgtaggggccacactgaaccccgccccctcacctgctagtccccaggaagggtctggggactgtgggaccctaatgaactgtcaggatcggcacttagtggggctcaaacgcggcttctcggcccatttttttaatttttattttttattgtcagattctttaggcttgggaggtggctagttggggcacgagctgtatttaatcagctcttagtggatgcaggtgtctgcggacctagggggcgggttcaggcttgcgactttctcctcttgctggcagtgcggatctttctcttcggaaatggaagccaggtgacatagctttcattggcctcgggctgctgctgccaggtgggttggcagtgttgccagtcttggcctagacagcctgggtcccaacccttggaatctctcagagtgtaggttatccctgggtgcgctgtgaagatcctaagcacacaatccaggtgaaacggaaagtagaatgtaccgagcaaaggaaactaagcaagcacacatgggcctgggcccagtacagcgacacatacggacccaactgtagagagtcccaagaatggcaaacattttttgtaagccagggaacacgcatacgcaatgactgtgtggtcatttatcaggtcagcacagagcagagtgaataattgaaacatcgatttcctttccttttttagataaagatagagaaaatgataaggagaaaaaagcagtggtaagtttctctttgcatgctttctccagcgtaatttcggtttggttttgttttttttttttttttttttttgaggcggagaacaaaaacaatggtgcgcacagtgaaaaaccaaacccaagacgatatccagggtcacaaatctctcttccttcttgtggcccggttcctctccttagattccatcaccgttagccatttcttgtgtgtacgggcgggagtggggcctcgagctgcattcaggtagtaagcactcatgttcaggtgtttgtgaactgccaaagatgctgaccgagccatctaaacggcttaaattgcatctatttgcttcactgccgattgccccgcccagatgtgggggggaagtgttcttctcacttccttctgctgtctagtggagaccagagaatccacgagggacctcagggtggcctcagtcaggaggtgcttgacaggcaggctctgggggttggggctgtgaggtcaaaggaagtgcaagttagacaggtttaaatgttgcagcagtattttggttaccaccagcccaaggggttcagtttcttcctttgagatcatctcaccccaggctggcctcaaacttgtgatccttcggcttcgacccctcctgaacactgggatttcagttgtgtgtcactcccaagtggtcagggcccgtttctgtaagggagctgaaagccttgagctcagatggctggggagaaggcagctggagcaccttagtgcctctggagggtggaaggtgtgccctcctgtaccccttggtggggcagtggaggtagtcaggaggaaggcgtgtccctgggaagcaggagtgacatcacaggaagaggaggcttggttttcaaggctggagaaatggctcagcagttaagagctcttgttgatgttacagaagattcaggtttttgttcctagcactcacgtgacagcccacaaactgtttacttccaattccaaaggatctgaccccgcctctgctgctcttcatggacaccaggcatacactggagcacagacgtacaagcaggcaaaccatttatccatataaaatacatctaaaaagttagaggaggaaggtggtggtggcggcacaggcctttgatcccaacactcgggaggcagttctctcagttgaaggccagcctggtctacagagggatttccaggacagccagagttacacaaagaaaccctgtcttaaacaaccaaaataaataaataaaatgaatgaaggagagaaagaaaatatggatagctagtgacatagaatttgtatttgtaattgttgagctaaccttgccaagtgttggacctgttctggatatggtctgatgcacccctgggtgtacagtagcagtttgtagaaagtggtagtgtggagcctggtctcaggctcagggtagccatttaagtacatttttgtgtgggaggcgctgggctggaaccatgagacttgaaaacaaagccattggcattgcgcacggtaacctgacagacgggacagtaaaaaggacatcagtgaatctagaaagcagtgagtgagcttggggctttgaggaggggactcaggactctgtgcagccttgggaagccttgatgccccctgagaggtagaggagaggggactgtagttgtaagaatgtagagagagccgtaggctggctttatagtctgtccttagatagtggaggcttggaagtgttcagagaaattgggctagatgccaacgtcagagtcaccaaaggacttcaccataaactgtgtaatttttactaatttatttatttattttttaagttttcgagacagggtctcactgtcttaccacgtagccctgtctgaattggaaatcacagatcctcctgcctccgcctccctagtgctggcattaaagggtgtatcatgtaacctttgaggagtagaaatttatttgtttcgtgtttctgggggctggaaagttcaaggttgaaggactaatatctgctggaggctgcatatgtgtttcatcccatggaagagaagagaagacaagaccagacccactccacagatcatgcctttttttatcaggaacccatccactgataactgccctacctccacaatactactcccgaattcgcctccacaagtcactctttgtgcatgactgctctatttgcaggtacacctgcatgccagaagagagcatcagatcctattacagatggttgtgagccaccatgtggttgcttggaattgaactcaggacctctagaagagcagccagtgctcttaaccactgagctatctctctaacccccaccagtcactcttgatggcggagttcacacaatctctctgcaaggtctaatctctcaacactgttgtaccggggactaagtttccagcttgtgaactttaggggatgcattcagatcgtagcactgccacgcactgtggtccgacttgcctttcagggtgagatggtagggatcacagcaggagagctgtggggtaagctgagaggtacagaggagtagcgaggtctccctctaggagtaggagaaatgctacttgtttgtccttggttttcattaaacatccaaattgattggcagttctgtagggttacggtgatcattactattgtattgctcctcccctgacagggtctcaactgtgtcctggctggccttgaactcacagagaccacctatacaatgagaatgtttaacttcctttttttgatatattaaatgttacttaaaaagaaaggtgtagagttgggtatggtggtacaggcctgtaataccagcattgaggagactgaggtgagaggttggagaatttgaagttatcctgggcaacagcaagacactcacatacatccccccccccaaataaaagacttatttactttatttatatgagtatactgtaactatcttcagacagaagaggacatcggatacaattacagatggcagatggttgtgagccatcatgtggttgctgggaattgaactcatgacctctggaagagcagccagtgctcttaaccactgagctatctctccagcccccctctgtctctaaataactaaaaagtaaaaatgagagtgggtggatttccgtcgtaacgcgtgcttagcaagcatcaggtaagttccattcccagcaccagagaaagatgctcacccgtgccagttacagtggctggagagtggactctgcttctgggggagagtgggctgagccgcggcacagacacagaactttgagccaagctgcctgcatcctacagcagcacagcctcctatctctgtaatctgttactttctttgctaccctcacatttactgtgaacactgttgaggctgggaccagattttccatatgatgtgctgggctcatagtaggccttcaagcagttgaaagactcaaacctgcctggtttactgccttgtcaaatcaccacgtattggtggtaacttctagcgagggtgtggagcaacaggctacttgctatatggtagggtaggcacttctctgtgtgacccagaggatgtgcaagaaggttctgaaggagcaatctgtcttagattgaactgtgcacctgtcgtgatctgctggagccaaaaccaaaatatcgattgagggcttctctgtacaagtcagcaagttggatcctagacggcatgcacgcgatttttagtctcaaagccattgataaaagtcaggttaaggaaatgggacacttttatactaacacagaacagtgtgaagggtggatctagggaagggctcagaacttgactgggcagacaagttgtgtgcagtttaggtgacgtaggtggcagggagaagggtgtgttgtttgggctgaggatgtagtccaggggcagatagcttgattggtatgtatgaggctctgggtttgacccctagcttatttaaaacaagaacaagcgggaccgggtcaggtgtggatggatcacatgggtttgtcagagggtgcggcatgagggatgctgatactgtgtggtgggaccttgggggattcccaaggtagggttttagcttacctctcaaagtcctggcccgaaccaagaacctggctattcacctgagcctagttctgtcgtgctttatctctatgcctaatgtacatttgtcttctgccaggtttgtattgagggcaatattgcaagtgggaagacgacatgcctggagttcttctccaatacaacagacgtcgaggtaaggctcttacagtgggtttgtaggaacccgaaacacctcagtggagtaagttataccgggcacagagagccctgtccagcagaaggctgatgcgagctgccagtgagctgcacgtctgatccggtgcctttaaagcctcgtggagtgaagcagggggagctgtaagacagccctgatgtcaattaacatgtcaacatgaagtcagtgttaaagcaatgaatggactgttcacattctgtgtttgatactcaatccctgggcctggagttcagttagtgtttacagctttctcagtttggactcccagataatgcccaaggcatgatttctcaactccggattttgtttgactataccgtgctgccaaggcagtatacattcagtccagtagattagtaatgcacttcagctcggcctgttttcaagtgaggacacagcccccttaaagaagaggcgcatctgtggtcaagcttcaaggtcatcgtggttgcatgtggcttgtggcccctgtatgcagtggtacatgagctcccaccattcctgtctgagaagggaactttctgtgtgggggctgctgatgcaaacagtatggatcatcctggacaactgcttgcttcttggggagctgggcttttggaatgtgccaggcagtgatagtctgtgtagttatgtgacccctgagcttccaggcctaggtcacctttcctggtagacagtacttgacatgtgttgtcacaacttgttgctgggaaaattgagtgtgtcttgtgtgactccattgggcaaggatacttgggagttctggcccatctccctccaggtacatcccctgtgcagatttggtgctgtgacctctcatggcagttaatattggctgtcagtgttggatgatgtctcatcgatcatcagcgacccagcgaccggccttgagtggtgaccctctgaacagaacttgaaaagtgcttatatcctcactgtagaccttggggccagttagcaacagtagccgcagcagtagctaaaatgatccaaggcaccgtgttaagtgtttatggcatatctaattgattccatgcttatctgcttaacaaccctctgaggtaagcactgttatctctgctgaggcgaggaagcaaaggataactggcttatagaatttatatggtgtgatagttaattttaggtggcagcttgccagaattaacgactgcagcagcctcccccactcagcgtggtttcagttacccgaggtcaaccaggatctaaagtattaagtagaaactttgggatgtatttaagttctgcattgttgtacgatgtacccaaagagatctcatcccgcccatgtaagccatcctgctgtctagcataggaaagaaaagcatggcaagtgttaggcttgttgtacctgaagcttcaggcatccgctggggatcttgcaaccccaggaacaaggaggcagcactgtgcctgggggctgatgaagtgttacctctatacacgtttagagggtgcttctggagaagaccgatatgtaaattggcagccttactaatatataatataacaggtcatataattggccacagtcctggatagaacaaaaaggaaagaaaaggattttccccccctcttcctgctgtgggacaccaaactgctggctttccagccttaggacttagggacttagccagaggccccaggctccagggtttcagccccatacttaacattacgccagtgatctctctgttatcagactttagacctagactgagctctgccgcttgcatccctgggacccaagctggagacgacctgtcatgacacagaggtcttggcctccataatggtagagccaatcttgctcacgaatttcatcttgtatgtcagtttctatgttcatgcaattggatctacctctgaggagagtcctcacctatcaagtagtgtgtgtcggggccagtcccagcaaaggctgtggagcttcagggatgctgtccatgtttgtctccaagctgtgaagagcttggttgacttcaccgagcctattcccctctagactgagccagtttgcagtcagtcacaggaaggacttccccacctagaaggagctgtggccgttcaagggttcatcccacccttggtctgtagtgcttgcctgcctgtattctagatttggcatgctgtcacacgtttgctctccttccaggtgttaatggagcctgtgctcaagtggagaaatgtccatggccataaccctctggtgagtagtttgtctcttgcacaaatgccagcttccctgtgagtgcctaggagtgctggttctgaggcctgtgcccagcacagccagtctgtccccattgttctagctcattcagaggaaaggggaatggcgagccagggatttctgaggcctgggtgggtttgcacgaagcccaggaacctcccgtgaggtgtctccaaggttccaagtggcttagctttccttggcacttgttccaggtcaccaggtttctcgatgagcctctgacttgggtttgggctttacattaccgaggaatggatccctgtggtttaccctggagctacccatgttccttgccaaggtggggctagagagccagggactgtaatgtgcatgagccttctccctcctacactctgaaagctttgtgctgcctgcttgaacaaagactgatagaaagcagatgctaccagaggggatgaagaaggactgtggtcctgggctcccgtgctatggtatggggtgcttagtatttctcagctaagaaaactggtcatgtaggtttagcagtgcctcgcagtacctcggcaataccacgtgtagagtccattagactcaggcccacagcagacagcactgtgtctgctggaacccggctttaggacccacttgctcactcactcaggatttattacataccttttatgtggccaacactgcttcgcactctaggacactgagcaatttaataaagcctctggtctcctggccctaacatccactgtggagatgaaggagacaggtattagaatgtggtggcgagtgacaggagctgtgaggagagctacagcaggtgaaaggatgctagttagataagacagaagctcacagttttaaaataggaatcgcacagagctgtgacaggaatctcacttgtgtgcatgtgggaagaagatgggattgtcagccatcttttagtataacagagataatccattgcccttcatannnnnnnnnnnnnnnnnnnnnnnnnnnnnnnnnnnnnnnnnnnnnnnnnnnnnnnnnnnnnnnnnnnnnnnnnnnnnnnnnnnntaagacaagggtagttttagatgtctgagactaaaggagacacttcacagaccagaagtacagtctcagaaggtcgcataacaagtgttatccttaccatctcttcatcatcatcgtcatcaccaccatcatcagatatatttccactcctttctgctggttggaaacacaagactgctgcttgtgtgacagttactggctcaccacgctggctccgtgatgcagaaagtcgcctgtttccgcagtcatccagcttctgactttgctgagattttctttgacccataactaggaaagcctttagttctcagtgctgagcaccgagtgcggaagtgcagaaaggaagctggcgtcctgtcacatgcctgtgatctctccacccgtgaaagctgaggcaggaaaaccccaagttcctgaccatcctggttgtttaataagactcggtcttccctcttctctccagacagaaccccatccttatccgtccaacacacaccagcacacacacacacacacactcgtgcatatgcacacgtacaccctagagagagaagcaaaagattactagaattactagagagtagactgcagcaggaagtgcttttatctgtaggtgacagaagattgagggctggcctctattttatcagggtaggtaggacaatgcatctctatgaaggcgacatttgtcagagacctacatgtgagggagggggcactgcaggcacctggaggaagagtaaaagaggcaggtgccagagccctgaggtgggggcctgcttggcatgcttgcagagcactaaggaagtttgtgtgcctggaagctgattggccagagaaagaagggtaagagacaagtggatgaaggtgggtttctagggcctgtggttcagatgggggtttagatttgatttgcacccaatgcaaagtccctagacgggagatgttagcaagctcattttggctgctggatagagaacagaccacagggaaactcaaaggccaactatgagtgtctaagtgccttttcctcaggcagcacatcctggtctggctgttagggggctctcttatagttgtgttcacatttgtctctgtccacctactctgagattcctacagctgtcctgagtacatctctggcctcagccctgcccctgtgggtttcctgaaatggctttcacggacttcaagacctgggccctgcctgtacttgccacttggacacaaagtgctttgctttcctccctgcagagcctcatgtaccatgatgccagccgatggggcctcacactgcagacgtacgtgcagctcaccatgctggaccagcacacgcgccctcaggtatgtcacaggtctcactttcaaccttataaacatccttcagattcaggtgttgtcagatagggacatcatagtaaatgtccctttggacctttatgctgtccagtcttctgacttcagtaaggtctcctgtcctcacaggtggctgtgctggtgccatcctgagctcacatctgtaatctgatgaaaagttgctaaggataacacacacaatgcaaccttctgagactgtacttatggtctgtgaagtgtctccttgagtctcaggcatctaaactactacccttgtcttacttgatatcaagccttgagttctctctgacttctagaaagtatgaaggccggtggtttttctctattataccaacgcatgcacacaagtgagattcctgtcatagagctgagtgattccagcttttgaccatcctttaacacagaatccctggcttggggcatcattgtcacctgggggcttgttagaattgtacatttctcatctcctccccagatctactgagtcaggaaatctggggctaaggtctaggagcctgctttatccagctgtgcaggactcctggatatgtgttctgcgtgtctacctgtttgagagcagacctttgtgaggtctggctttcagattctcgaaagaatctgattcaccttgggtcacaaccaggtgttggggcaggacaggacacacagcgatacttaggtccttccattagcaggagcaggttgtcttaggaggtcaggtggcaagggtgaccatggttgctacctatgggaaaagctttatacacaggtagaccctttccctgtaggagacaggatacccctatagccagttacgttagcaccatcattaggctgagcagttggctccaagtgtggctccctgcagctgtaggtgtcattcttctgtcgacatcagtctgtatctttacaaattgacagatgggaatagaatctttagaagaatatgaatttgtcctttccaatggtttcctaagtgacagagagcagaacacctgcagttagcaccttccccttggtttgctctgctttgcctaagtgggcattttaaattatatccgatgatctgtgaatattatgggatgtgggctgaaatctgctaaggaggcaaaggcagagctggctggactcagcaggagagagatggctgaagagggagccggaaacagatgggaaagaaagataggagcagcacgtgcagaagggacagaaggaaaacagatgggtgcgcagagccaggaggccgggaggtaagcagcgagtgggctgtaggcttgaacgtgctctgggtcacactgtctactaggtgtcggatgggcaggtccctcctgctctccaaaaggacgtagtagacgaagggaaagatgatccatggagggtgtgagcaacttgcagaaaggtgatgtgcagcctcttctctgttggtcagagtacttttcagttccagcaggcagtgcctccctaaccctagtcttttggggctctgcttcagacacccaggtccctggctcagggctccactcaccagactgtgtcagcggggcagctttgccaacgtgttccatatcctagtgagtctcccttctcctgtgagagcaactgtggggctgctggcagccctgggcccccacatggctgcctttactgtcctctgtcctctaaacttcaggatggctcaggtcagggtggagggagacacacagtgagtctcatggcagatttggcttctgttgactgttgtcctccctcacagtctctgtccagcagagatggaagggacccgtaagaggactggggcaagttcttcagggcttcctgtaccttcctcctcgcctgagagtaaatccctttttccattcctttagatgtcacctgtacggttgatggaaaggtcaatttacagcgcaagatacatttttgtagaaaacctgtatagaaggtactgtagcttgtatagcccatcatttattaactgattttgtgtatgtgtgtttgtgtatatatattaatatgtatatgtgtgtttaggtgtaggtgggtgtgagcatgtaggtgtgagtgcataggtgtgggtatgtaggtgtgggtgtgtaggtgtaggtatgtaggtgtgggtgtgtgggtgtgtaggtgtgagtgcataggtgtgggtgcgtagatgtgggtgtgtaggtgtgagtgcataggtgtggatatgtaggcatgtggaggccaaaggacagccttgggtgctggttctcaggaagtatctatattactttaattattttttctttaggtttgtttagttttatgggtatgagtgtgcttacatatatgtatgtgttccaggtgtgatcatggaggacagaagaagctattagattacctggaactggagttacagatggttgtgagccatgtgggtgctaggacctgaatccaggtcctttgagatagtagcaaatccctgagccatctctccagccctccactgtgctttttgagacagggttgctcacttcttagttatcgcttctaggctaggctgactggccagcatacctcagggatctgcctgtttctaatttccagtgctaaaattgcaagcagatagcctcatgcccgtgcttttacatgggatctggcagctgaactcggctccccatggtagcacaaatactttaccatcagagctgtctccctggccctaaactattgctggtggagttagttgcctagttacctgacagattcggagtaccaacagtattgatgagcttcggttgctttataatgttgtgtaacaaccaccaacccactagtgacagccaccttcctttattgccaggtcagtttgggaggtcagccaagtggctccttttaccttggctgggcttagcaaaatgcctgggagtgggctggactagaatggacttgacccaggtggtccaggcaactcatttctcttcctctcacctgtcatcccctctgggaccagaagcaagcataggccctgtcatctcatgtgtgtggcatagggcaaaagtcccagtggacacacagcggcatgcttacatttgttgttccgcccttgcccacatcccattggtcccatgcctagggatggcaggcgagagggccaagggggtccatggcacaatgcaagcttctgggaagatggagatttgggatgcttagagcagttagtctgccccgtgcttatgctgtgtatagcttctgtcctcagttatctagacagttggaaggcttcaggtgcccacccgggcttagggctccagtgtgggcagggcctaatgtctgctcaggttattgataatttgggagggtcttagaggaaacaggttgcagactgaggtctgaagtttcagccttttctgagctgtttccatcttcatagccatgtatcttgtcctcatgtccttgtcagtgcccgattcttaccacctcttcctgctctgagcctgcagtgccactgccacttcttaggcagtcctgacacttgtacagaatgttcctagcttcccagacccctccctcccatcacagctgtccttatggttctgtctcagcccttcatgtgtctgtgtgtctgtgtgtctgtgtgtctgtgtgtctgtgcctggtgcccatggaggtcagaataaggcattggatcctctcagactaaatctatgtacacagctaactccatttcctaggtggaagcagcaaacagttcaagacaaaggataattatctacatcttgctagtggggcaagcaaggtgtgcggaatagtgagaggctccgatttctcttattcaggtcatccctcaggcaccactgaagcccctcctctctccacactggctttactcatgccctctattaccatactgagcaagtccccttgtactgaggccgcccagggctctctgtgtttatcaggcaccttctggttgaggactgtgatgtaaacgaggtccaccagagggcagccactgcgtaactacaggggttcctgcatccctatgctttagcccttttcctgccggggaggcctggccttctgtcctgggaacaagactgagctctgagagttgtccttgggattgagggtttatggtgcagggtttcctctgtgttgtactcagcctgtgggttccatttcacacgtgggacctgaggttttgctggttgggtttttacacttctatggtaaagagtcccaggtttttgtccaggtctagagtggagcagctgtcagccaaaggctttctgttttgacagtgaaaagggttttgatcagagcttcagaggaccaataggaggagaagggagtttggggttcttatacggtcactctcctcgtaactccagcatgcccagtgcaccggtgtctcacagggggtgctatagagaaaggaaattgtctagagctttctacctcctgttcccatctcatcgagaattagtcaccttaggtagaaggtgctgaaaaaacaaagaggctgatagatccaggactgtgcaaactgcagtttattagggactgggggcagaagcggcnnnnnnnnnnnnnnnnnnnnnnnnnnnnnnnnnnnnnnnnnnnnnnnnnnnnnnnnnnnnnnnnnnnnnnnnnnnnnnnnnnnnnnnnnnnnnnnnnnnnnnnnnnnnnnnnnnnnnnnnnnnnnnnnnnnnnnnnnnnnnnnnnnnnnnnnnnnnnnnnnnnnnnnnnnnnnnnnnnnnnnnnnnnnnnnnnnnnnnnnnnnnnnnnnnnnnnnnnnnnnnnnnnnnnnnnnnnnnnnnnnnnnnnnnnnnnnnnnnnnnnnnnnnnnnnnnnnnnnnnnnnnnnnnnnnnnnnnnnnnnnnnnnnnnnnnnnnnnnnnnnnnnnnnnnnnnnnnnnnnnnnnnnnnnnnnnnnnnnnnnnnnnnnnnnnnnnnnnnnnnnnnnnnnnnnnnntagctatctgaatatctatttgctccttagggcttgaaatacacgccaggttctcatggtggataaaatagagttacgacaaacatgtatacgagccgtcaacttgtttccagcctgaaagctggttctgtaatgcagaattagctttagtggtatccttagcctgtatttggactaaaatgtcttggttcttacctgtggaagctcagctgggcactggtatgcttccccacttcctgtgctgcccatggcttgctaatgtgcagtggtggaaagccctttcatagacgggtctagtcatggctgacctggcagtgccaggttcatcttttccccagggatccctagaccctttgctgaggatctggaggtgggggcctggctctgcaatctgtaattgaaaggttgggtttctggagaagcccacagatatgaattggtgttctacatttcctcaaagcaaaatttctccgtgttcttgcctttgggatcttgaacaagtaactgcgaaggagagacatacctcttctggtgaggtaggaaggcagagtgagctcagttacatcactagcagtccgagagctttgtgtggattactgaagaggaaggtcagctttcatgctgtcctcagaaacaggaactgagctgtgtgcactgggctgcaatgcagagctaaaggtggcacagaagcgttatggccaaagaagccacgcaggcagttgtgtagtaagctctgtggctgagggattgagcaaatgttttacaagactgcttggtcttcctttcctaaggtcagggtagaggaatggagtgggtgcagctgggaacatggcgttgactcacctggcacatgggaacaatgggcaggtcctccctacctccctgcccagccccagaaccaggaggccaggccacagaaacacgggggatccaggttagcccctcagggaggacaacaaatgcagtggagagcaggtgggactgagggcaaggctctgctggaacacagggctagaagaggaaacagtgtatttaagtatcaggtttctgtcttaatttgtttgaaatagtgtgttattgtgtagcctaggctaatctggaactaagaatttttatgtagcccaggttggtgtcaatcatgagatcatcctgcctcagcctcctaagtgctaggattacaagcaggtgccacttcaaccagcctttgatttggttttttgagcatcaggtactttcaactgaactaaatagaaacatggtacaaagtatggtgaacagtgggactgtccatggctcagctaaggagttgaattggactctctgtgttttggtcagggttactattgcttaatgaacaccatgacccatagcagcttggggaagaaagtatttcactcacagttccatggatcagctcagcatcaaaagcagttagaacaggcagaaacttaagcaggacaggaacctggaggcaggagctgatgcagaggccgtggaggggtgctgcttactggcttgctcccagtggcttgctcagcctgctcgcttatagaacccagcgtgtatgtgtgctcattatacacaagtgtggagcccagataaggacacagtccctgctctatcacatttataccttcttctctgagacagagtccttgactgaaccaaagcttgctttcggttagacttgctggtctaggagctctatctgtcccagcaccacagggctgggtttagaggctcagggccatgcctggcttttttttttccctatggggacttgaactcaggcactaatgcttgcagagtaggcactcttatttactgagccttcttcccagcattgcttttttagtcttaatatttaaactgtgtaatagtgccgcctcactcttgttctgagcactgatactttgctcaagtttaaaaagtaaagagccaaggaggaagagtctacagtctgcagctcagagagaagccctgcaagcatttctgtgtatcttttcaaatgaggacatatgttttttgtgtggttgaggcatatgcatacaatttagcctcctgtatccattgagcagcatcaagttcagagtctttcccctgtctgcgtatgactttcctacatcatccttcagctactgtgtgcttttgctgcagagatagatcaagacttcatttctcacaatgctgaacagtggtgcatggcgagcatccatgagcattttcacagagaatgagttctagaagtgaaaatgattggctgatccactcccaacttgaatgatgtctccacgtgtagagggcagactaagatgctttgtctccttggagttcattccagagtaggctccatcagtcactgctggggccagctcccatctcccagtggtggaaggtcagacagacagatgctcagggtcctggcagtaccatgtgggcatcatctgtggaccacactatgcaacatgctcttggtgctgcccttccaaacaaaagccaccccttagtcctttgggggaatgacacagcacatgggtgaataaaaatctttgacctctgattgcagtgggaagatgcccgaggttgactacgcgattctgtctgagtggtttgactggatcgtcaggaacattgatgtctctgttgatctgataggtaagacagtctctctctgtcccctacctggaggcttccctgggcacagctggggtatacttgggaggttctaccttggatcgacagaaggcagggacacctatcacctgtgatgcctcctctatcacagctcaccaaggcaggcagcatttagggggttcttctgtccatgaaggaactctggccttggttccttaaacttccttcttctgggtcaactacttctggtggcccccatttgttctgttttgatggcttttcagtattgtgtgggagggacagaaattgagtagtggctaaagccaatggcttgccagaccctgtctaagaatggaattcctttaagcttcatgatgatactgtagggctgaggacaagaaaggggactggggcctgagggtcgggaatcctgttggtcccacagactgagcaggcttggtgaggctcctgcacgctccaccccaggcctgtgttgcccttgtctgctcccacaccaggagcacagcactcagtcgcttgtggttttacttctcagtttatctgcgaaccactcccgaaatctgctaccagagattaaagatgaggtgccgggaagaggagaaagtcattccgatggtaagagaccagagccacctccacctcatcctgccagccctctcctttcctccaccatgacactatcacgcttatctggagcaaaacccaggaagtacgactgaggcagctcaggcttcctctatggctttggagcccttgtgggtcccagggccactttacttcctatgtttcctgactcaggcctctgcacctccatgtacacacacacacacacacacacacacacacacacacacacacacacacacacacgtacaggcacaccccccccccccacacacccactgtgtatatactcatttgttctgtacagtagcttgtcttcacacacgcacatgcatgcactcacaccccatggacttagacaaatgtgcctttgcatagtagcttctcttcagctgtgatgtcactttcctggccttccttacattgcccctaggcctcctatggtgatagccctcagaacagcatattggcagagtttgttcccatttatctttacaccataaacacttttagattttggttttatttcttctgtcttcaacatgtgtcctggggcctagcacctagcagttgcttagttaatactggactgagtgtgagtactttatgtgcacagttgtccttgaaggatagataggggcaggctcttttgggacatcatggtgctctgaacctaggatgagacctaaaagccaggtgtggtggcacacacctttaatcccagtactctggaggcagaggcaggcagatttctgagttcgaggccagcctggtctacaaagtgagttccagggctatacagagaaaccctatctcgaaaaaccaaaaaaaaaaaaaaaaaaaaaaaaagatgagacctgaaagaccagtctgatcccttaagctcagccaggttttgttttggactaacaagagacatcccagccatgaaggcctaggccttgctctgggcacttcgtttgaaatctcaaagacaggagtgatagaggatggagcattgtgggctgtgctgtaatgaggcttggcatttagaaatgccatgtctggagttcttccaatccattatccaaggggttgccaaggtctttaggacaagcttggctctagtaccagggggagtccaggctgttcatgtcacttcctaatagtccttgagaattctgccccgccctgtccctgtgagacccttggtgggtgggattcccccctcccctctccctacagcccttgtgtttccatggcaggaatacctccatgctattcaccgcctctacgaggagtggctggtcaacgggagcctcttcccagctgcagcccctgttctggtaagtcactgtccctcccagagaatgtcacctggacagagactcagagggactcggacttgaggaggctagttattttagtaacatgtcgtactcatcatcaccacaaagaagtcctcagttactctggacctgggtttgcatttggacctttggggatgatggtgtccattcttcagtgggtgacacggagcccatcgtcacccatcgtcatagttaggtgactgggcatcttctgaaggcatctcagtggttgtcctcagttgtcacacagtggcacctcaggagctgctgaggtgtaaaagtgccacgctcctgctgcctccaagctgcaggccaatgtagcagtgctggtgtgtcctacctatccatatgtcctactgtgtgtcctgtgccccagtgtgctcctcctgaatttcctcaggcaggcaggtgtacttgaggccgtctcacatccagccggtgatcatgggcttttgtttatgcccttgggctgtaggccacagagacatcctggtgctaagagacaggtgataagggacatgtcactgtgggaactttcagagtttattgtttccttcactgtgaaaagcaaacctgagagggctgggaaagtggcagagtggcagagaacttgtctagacattggagtccccgggtttagcccccagcagagccccaactcctgtctcagtgaaaagaaaaggcattgttggtgggatgtggaaatctggttgagagtgtcagttgccctggagccagagtgtgtggttctgaccctcttggcctctcagcctcttgcctccccagtggggatggagatggccagtgcagcctgtgacctgtttgttttatttccaggtgattgaggctgaccacaacttggagaaaatgttagaactctttgaacaaaaccgggcccggatattaactccagagaactggaagcatggaccctaggactgagtgatctacaagacagcgccaggaacagcccagccagggccaggttagctgctaggagcatttggaagaatctactcttaggagggtctgttatctaatcagatctattttctcaatggtcttttcactgcagtacaaatggcttttgtctgtcagatgcttgcagcatacatccctcctggtgcccctcctggtggcttcctaacgatgaagccctgtgttaaaatcactgactgtatccctggggttgttctggatcctctgcatcaggtcacctcatgggtgagggagcagtcttccaccccaggcaaggatttgaagcccagagaggtgtggggactcgtcaagccagagcattgtggagggagctgggaccattcagatacctggtttgggctgcctcctcctaagctgttccccaccgccctgctgctctgagcaccagcccccgcctctgtgagaagagtggacagtttgtgaattccatcatctttcagtaccgggccagttcaaggagaccagacatcactaggtgttggcacacctctcttatttggcatgagcccagggtgtcctggtatgagggtactgtgacctctatccattcctttgtcacctggacctcggtgtccactggggactcctggatcggcctctgcttggtgccagagtccttgaggatgagtcctccccagactctaccagttccctgtcgttttgtgtcagaaaaaagggggttatgggacctggacactttaccctttgctgagcgaggccaagggcagccagctgagcttccaagaccccatcactctctcctgtccttgtgtgaggagcagtgtccccttgctccagggagagtgacagtggccttaactcctttgaagtgtttttccatctgagcagatgtcatggaccacgagcatgaagaagtcatctctattggatcagaaaataccttagctttgctgagccgtaactgtgcactgaaggtgcagctgttacttgaatcagtcatgaccaagagaggccggccattcctcaggaccgtgagactggaaagtcatggtttgccaacaaagacaatttaagccttgctgctcttgacattctagaatggatggagtgcatctggaaaagactggacacagatgatacaggggaatgatgaccgtataccctggagaagcacagcacaggctggggagggggctgcaggggagccctgctcccctgtttagctgcctgggagctagaaagagggccaagagtccagctcttggtcctttctgtttggaccaattcttggcccttttggtagtatgaagagtagcatccagggagattgtccatcagcacctgcagtccagcaatggataaacctgagaaaggcaggaactttgaaccagcagtactcatgggggcatctttagaatttgcaaacgaacagtctagtacttgccctttgctctaccagaacacttgttttggggagaaatgtgctgtttctctttctctctagtagccaataaaattctacagctaaaccatgatgtaaattcattttcattcattcattcattcattcattcattcattcatccatattctctctctctccctccctccttctctccccctctctctttctctccctcttccctccctctccttttcactctccctctcttctttgagtcaggttatattttatagactggcctggccttgaactctcagaagtatttttgcctcaaacttttgagttacaggcatgtgacactatgtctggcttgtgtgttcacttttgagttgactttattttattttttattgttatgtgtttgtgtgttttgcctgtatataaaagtatgcctggtgaccatagaggccagaagagggcattggatcttttgggactggagttgcagttgtggcttgccatgggcatgctaggacttgaacctagggtccctagaagaacacccagcgtgcttaactcctgagccatctctagccccatgtgttcatttttcaaacaccacattttatagtatagtgcgcatggctcaaaaaagagcctgctgtccttgcacttcaacactgcagacaggagatcatctccagtaatggctaaggtttgcagaaccttccagctcaaaagatcacactcaaaacagccagaagcatctttcccaaggactgctatcaggcagacctggtaggggcaggggtcatggagcaagtaccagcactaacatctcatggccagaaaagggcaggtaacacatggtgggccacaaggcctagttcttagacacagggcatcactgccttcagctgtctccgagtggctggtggagcgtggcagggactggcatccctgaagagctagagtgttgtcacttgatcctaaccaagaccacttattcctttcatctgggtcagatttcacaaactgcattttggagggtcccttctcagtgtttggaaaacgacctgtggctaaataaatgtggtaaacactctgccaagcaaggtgcccttgcttctggcctccacgattcctcaggctaagtagtaggctactgaggtgtggtattcctggagggagagagaggtacttcccgacctcgtggactcgcttcctaaacgaaaacattctttttattttgaatcatgtatatgcccatgtatctgtggcgccccatatatgtacatatatacacacatatgtacctgtgcacagtgtgcacggagtccaggagagggccctgaatgccctggagctgtagtttcatgttgtgagatgctggacgacggttccggggatcagatatgggctcactgtgtattttccatagctcctttgccaggtaatgtgaggccggcaatctagggatagttcagtaacttggggctcttctggtaggctaggtacatctccctcttctaataataacgggcaacctagctcctttatatgtacatactgtgcacacacccctccgtaaccaggttacctagcaatatgggctcactacctctgtcaggttgcgcacacacaccttgaaacaatggggtgagtttctcttcctctaacaacaatcagatggtttctattcaaatatattcctagtgtgtctgtgtataaagaatagaaaggctggtgtggcctcagctggttttgggtgtacatgcaggataggcaaaaacacttgtaggcagaatcttctatttttaccatcttatatgcctatgcctagcagggtgtgtgtatgatgaatgtcagatgcattatgagaatcggtatgcccagcagaaagatggttagatgtccaaagctatcaatcaaaacagaaccacctcttagtaacaaatgattctcttgggaaccgtaatcggagccttgggcatcctcacccactcgtcttgacagtgtgtccctctccagtctgttccatcactttgctctgattagaggtacttgctatggcaagggagcacattcagagaccttttagatctgtagggtcaggctggaatgctgacaaggcgcacactttcaacccctctgcctgtaatacacacataaaatgcctttagtacacaccttcaatcccaaacaatgcagctaaggttaggttgtagaaggaagcagccatatttgaaagtgatgtctaattgagtggtagagtgacaaatgagagaaagatttgacagaataggatatgcccaactctcatgaggagagggaaggagaagggggaggcgggggacaggtctaccaggacaatattactgagacagattgcgggtgaagacagaacgagccggagaacgagaaggaaccagaagattagaaacagactgccaaagttccgaggtcaagccgagcaattcagtcagaagctgagagaagccagtttgaatcagtcagcttggagagaagttttgagcaactgagttgaaccagccagccggagctcagaaagaactagaaagagtgagcttattcagcagtaagcctcgaagatgccaattatatctggtaagttacatttacacaaattggtgtgagctcgtcttcttttttcttttttttttttttagccattaagttaatttattgaaacagttgacttaggcatctacagtggtgacttcagcctccactcctggctccatattaatggaagcagtccgctcgacaatctcagaaggacagtgtagatcactgagtagcttgtggatcctcctttggaaatgatcacgtttggaaccttcaccacaaggggtttnnnnnnnnnnnnnnnnnnnnnnnnnnnnnnnnncatggctgaggcatggcttcctgaccgacttgttcttcagcaggagggaacagcggtgagtggggacggagcagactgtacagcgctccacagcccgcaccaccacgtctcagaaagctgagcccttattttcaattctttgggtaaaaggccaagaacctagaaatacttgctgcaaccctgacagttctgaccaccagtaagaaaggcagcaggttcacaggttctgagattacgatacaagcatctttgcatgggaggggagtcctgtggtccaccatcccaagtctagctgatactcaaagtcatacctgtccaatattgtgaaacttggtcgttgagaacaggggtggggggcttctagatggggagatgcaggactttaggtccttggcgattcgggctggttttgtgtgtcaacttgacagaagctagagtcatcagagaggaaggagcctcagataaggaaatgcctccatgagatccaactgtaaggcagtttctcaattagtgatcaatgaaggagggcccattgtgggtggtgccatccttggcctggtaatcctgggctctatgagaaagcaagctgagcaagccaggggaaacaagccagtaagcagcacacctcccatggcctctgcatcagctcctgcctccaggatcctgccctgtgtcctgacttccttgagctgtgaagagcgaggtggaagagcaagcgaaataaaccctctgctgtctacgttgctttctggccatggtgcttcagcacagcaatggaaaccctgactaagacacttgaccacgaagtgtgtccgtgggagccagagtctccactctccctgatttttggaggcagaggctcatgccactcaggctggctcaaacccagtatggagctgagcctggttttgctctgattctctggcctccatctcctgagtgctaacacgcacttgggcatcttaaagacactaatcaccgtgtttgtcttcctatctctttctttaatcccttggctgtgggcagattagttccttgaagagaaggcgggagtggcctccttttccactctcccagacctcgaaaactggcagactcagtttcccccttctcatgggattcttctgtttgctttggatttcttagtaagtgaaccatttccccagatctagacaccttagtccccagcacccattgggcctaagagccacccacttctagttctcaaagggaagccatgattgggaaggagagtgaaaacgctgcgtatggttgctgaagtcccctctccggcctcacatgtttgaacctgtcctgcttctccacggcagcttcctggcctgatgcctgcctctacatttggccggctgaagcctggttatactctctgggccctcaagagagtgatgcgctcagagagaacctgctctcactgatgcccaagcacttagctgcagggaagcaacggggattagtgcggaggttggacaacggctattcaagaacttcttttgtctcagcaggccggaggaccttcactttcaatagccctaaggtcccttgtataacctatgaacttgggctcataaaggagagagatccagttaaggatgcggcctgggcacagggtcccaggcctgagactcagcacttaactgtcatcaagctcatgtgtaacaccagggaaagggctgttttctgtcagaatagaaccgtatgttgttacatgttctctcccttgctctgccgccaaccacagccacttagaggctccagcagagtcctgtccagtccagtcagagtcctgtgagatctgatacttgctttctggaagagagagcatctcttcattctgggtcaggaaccaaccaagtcagacatgggacatttatcgtcattttaccaatgggagaatggagacagtgtggtggtcagagtccagagggacagtatatcaatccatgcccttggacttcctggatctagccacaaatgaagcctgacttatcacttggacaatttagtcacatgacccagtaagtattctttcttgcctcttgcaattgaataaagaagggggtgatggttggggctcagagcctgtcagagggtcaaactctccattttaatagaaaacagccctgcagcccctccccgggccccaaggactcagcctgatgagggtgacagtttggtggctgagactataacagggctgccgccttggaatttcttggaaatgtgctgagcagacacagctctgctacagcccagtggtcaaaggtatacctagctcccaagctcagacccattaggctttggctagataagggctcttgggctccagagagttagcatgggcttgggaagtaccgcgaagctaggcagaacagaacccaggacaatagatcgctctctgatgataaagcggtggcctttatatccagtccttggacaaccatgttagtgtcagaggatgcagacgggagctgggagcaggtgtgagctgcacctggctgtgcaaacgagagccttgcatggagagggtacttgtgtgggcaccaaggttgtctgagtaaacgtgtaggaaggaggagggagttatgtaatggtgccgtgtgcatgcacacggtttgtatatatgaacacaggcttaacccagtgatggtggagggtgcgcatggtagccatggactgctgttagcctcgctagtgacttgttctttccgtctgtgcttcagtgaggcctggtgcttagcagtggcagaggcctctggttgctagccaaagcctgggactttctgtgcccatccataatgattcagctacggtatggctttgtctgccacccgctgtggcttccctgtgtgaaggcctcttctgatctaaagagcctgcatggcaggaatcaacactctgtaaaaggctgcctcaaaacagcgctgctgagagccaggtatgagcgacacggagctgtcacctccgaatgcctgacatcgaggccttcaaggcatggtgtaccctgtctcttgggttgccactgggagagtttggtggcctgcatcctttcaagctttcatctcccgccacctccaccttctacttccccgatgccatttccctgaccggcgcttttgatagtatggccatgtaccaggagttggtcctgcttcttcctggcttaccatccgaatgatggaccatcacatgccatctcccagggattccaggcacccagctgttctccttaggccttgtccctggcaaacagagggctcaggctctttgtaggaatgggcagagccctgagcaggatgcctacagcccaaggagtacgtggatagaagagacaggcagaaccaagaggctgagagtcccaggagtttaaatcgttagaatgagcgtcagtgtaggtggtccgggtgggagtcagcatgtggctggacaccagcaccataaaggaggtagagccccacagtgcaacatagtagcaaacagaacagagggccaagtgttttgcatagagaggagaatgcagccaacaggaattatcagaaaatgagacccagagacaaaatctcctcttgaaaatcagcggtataatacaaacccgggatccaaacatcaggctcatatagctgtgagtgtcccacagcagcagtgggcttaaaaataaaagggatttcctcctcctcctagggtagagtctgtgacaaatgaacagtggcagcagagagccagcagggggcagtgtgtgcttgagttaggccagttgcaggacagcaggcctagggatttttcagaaggaacctgtgggtccctgtctcataatacccccgacacccccatctgcctcactttgttcagggtcacaccccaattttagggtgtgatttttgggattctctgtgctagcggaaggaaaacatgtccgagaaagacagtctctgtgcgtaaaaagaggtcaccaggcaaagcctctgtctgaagggcaatgagaaagatgagtgtttctgcagagggaagcatggagcatatttctattttcctcagaaggataagcctatggagtactgaaggccaaaagatggtaccttgtgtatgtggagtcaagttctgaaattggtggctcatcatatcctcacatcagacaggtctcagaggagtggcagcaggctccatatgaagggggctgggagatggctcagtaagtgaagtgcctgtcgtgcaagcaggtccaagtaggaggatctgagttcagattcccagtaccacataaagtccaggtgcacaagcacagcggggcacaggaggtctgggggacttgggtggccagccagccggtctaaactaataaggaagcagagacaggaggatcgccccctgggctacatagcaacatttgtttctaaaacccaaacacaagcagagaaacaaaagaggaaatcccatgagactgtgcagacaccccctccctacaagagcgccacctggcgcaaacttgagaaacagccagctgggcgtctcagcgttcagaggggcatacttaagactgcctgtttacagggttcccttcaccctctgaatttgcagccaccaggaacccgccggggcccctatacacccctcgaaagtatcacttccttctacgtatttgttgataatgagcatttattttgagtacagaaaagatacattgctgcttattcagcctaacctaggaaggagaaaagctgttccgcagatccctccgacgtggtgaataggcggggatgtttttctgcccccaccactttccagagctctagaaacagactgcctttcttaaaaagagtctcatccccggggtgtgttttaaaggctggacagtaccacagacagacatctttgcctagaaagcagaacgccacaaaggtgggcaaaagggcttgtaaacaaggctccctcccccaggcctgggactctagggtgctgcccgcagcctgcagccgctgccgcctagatgctacagaactggtggttgggccctttcggctctgcatcagaataaatgctttctctatagaaaataaaaatccttgctacccctctgcttaggaaagggattgatgaattttcttagcccttcattggaggagttgaatgtgggaaggggttcagtggggatgggtctgctcttctgggatgaccgtcagaaggtaggagtccgggaggcaggaggtctcactccctgccagcggcagtgctgacaggatcctcctcaaaggtgcttagctttggcaagccgggtcttcaaagatggcctcgtcaccttatatagtcttcgatggagatcacatcgctggagctcaaaggctaatatctgagcctatctccaactggctgcctccacacacctgcttccgtgatgggatgttggcagcagacactggtctcatagtgacatgaagttttttttgttttttttttgcttttttttttttttttttttttttgtggggtacatgtgtgtgtgttgtctctgtgtatatcccagagaggcaaggccagacttcatcagcccagtccccagctgggagttaccaccctggatgacagcgctggctctttggttggtctgagacctcttacacccaggtcaccagagctggctgggcacttactgagcagtggactcttctgtgcctcctctgagtgatgtctaggaagcattatgtgtgtatggggctgcccacaccttgtttctcttgagctctcaatcctggcacagacattagaagaactgtgttgttcctccacgatacaggcccaagggcctgtctccccctgaaacttagggtgggtgtctgagctaaccccactagcaccgccacactaaggacatcgagacaggctaaatgggctgtgaggacctccaggtcatgcctaagccaccagacctgtttctctcccacctcggaagtggcaggacggtgacattgtggctcttcagccctggagttgagagataggcacagtgcacagtgggaccttattgggacctgtctcagctcccaataggataagccctggggtaggagttatggcaggaagctgaccaagcagtctctgcaggagaatcagattgtggccatagcctagaggaggctggggagaggatagaaaattgggtttcctatctcacctctgcccagcactgttcagagaggcacggccaccaggcaccaggctggggaggaagagataccatgtagggaacacctcatccaaagaaaaccttcccaggtgagtttgtgtagtagtgggacatgtgcatatgcaggtgtctacatatgtgtgggttgtgtcagtgtaagcacttggggatatgtcagtatatattgatagtcatatatatgcatgtgcatgggttgtgtgtgcacctgtatgcctggaggagagagggtagcctggaaagaccagcggaatttatgagcttggccactcacacaatcctttcagggctgggcatcggagcctgggttgggatgggtgagccctgggagttacttggccatggttctggtcctggcaatggcagcaggtcagatggagagcctgtcccacacacagcttcataaggtggcagtgtgtccatggagacagtgtggagtctgctctgaccctgggtcctctgctcttgctgacggtggctgcggctctggccgctgtctgagtcaagggcgccattcagcctgggacaggagtcagtcatggagtagggcggtggtgcatccgtggggacatacagctgagtggcccctggtcccatgcattcctcatagctgtgagagaagagttttcactcaggggttgtagattctgagaccttcgggcagatggaagagtctgtattctgtatggcaaggagctgccctcattgtagaatacagccaacttcatatatgctggctcccatgagaccctctagtcctcagggaggacagtctgacacccttagctgggtcagacttgaccctcacatcccatgtgaaccaaagcaagtccttacacccctgcccctctctgtggggttttagattccctggagcaagaacagccctgtctagggaggagtcccagcctgggcactgtgaatgggctcggtaggacccactgagacatctccactgctgttttctagatttaggaatgagtctctagccctgaaaccat

SEQ ID NO: 200 - DNA, 2385 bp, Mus musculus
actatgctgctgcggtcgctgcgtagttgggctgcccggtccccgcgtagcgtgggcccggggagctccgggagccccgggagcctcgattcgggcgccgggccgctgtgggcacctcgccgcgcctggcctccggataaagatagagaaaatgataaggagaaaaaagcagtggtttgtattgagggcaatattgcaagtgggaagacgacatgcctggagttcttctccaatacaacagacgtcgaggtgttaatggagcctgtgctcaagtggagaaatgtccatggccataaccctctgagcctcatgtaccatgatgccagccgatggggcctcacactgcagacgtacgtgcagctcaccatgctggaccagcacacgcgccctcagatgtcacctgtacggttgatggaaaggtcaatttacagcgcaagatacatttttgtagaaaacctgtatagaggtgggaagatgcccgaggttgactacgcgattctgtctgagtggtttgactggatcgtcaggaacattgatgtctctgttgatctgatagtttatctgcgaaccactcccgaaatctgctaccagagattaaagatgaggtgccgggaagaggagaaagtcattccgatggaatacctccatgctattcaccgcctctacgaggagtggctggtcaacgggagcctcttcccagctgcagcccctgttctggtgattgaggctgaccacaacttggagaaaatgttagaactctttgaacaaaaccgggcccggatattaactccagagaactggaagcatggaccctaggactgagtgatctacaagacagcgccaggaacagcccagccagggccaggttagctgctaggagcatttggaagaatctactcttaggagggtctgttatctaatcagatctattttctcaatggtctttttcactgcagtacaaatggcttttgtctgtcagatgcttgcagcatacatccctcctggtgcccctcctggtggcttcctaacgatgaagccctgtgttaaaatcactgactgtatccctggggttgttctggatcctctgcatcaggtcacctcatgggtgaggggagcagtcttcaccccaggcaaggatttgaagcccagagaggtgtggggactcgtcaagccagacattgtggagggagctgggaccattcaggtacctggtttgggctgcctcctcctaagctgttccccaccgccctgctgctctgagcaccagcccccgcctctgtgagaagagtggacagtttgtgaattccatcatctttcagtaccgggccagttcaaggagaccagacatcactaggtgttggcacacctctcttatttggcatgagcccagggtgtcctggtatgagggtactgtgacctctatccattcctttgtcacctggacctcggtgtccactggggactcctggatcggcctctgcttggtgccagagtccttgaggatgagtcctccccagactctacccgttccctgtcgttttgtgtcagaaaaaagggggttatgggacctggacactttaccctttgctgagcgaggccaagggcagccagctgagcttccaagaccccatcactctctcctgtccttgtgtgagagagcagtgtccccttgctccagggagagtgacagtggccttaactcctttgaagtgtttttccatctgagcagatgtcatgacccacgagcatgaagaagtcatctctattggatcagaaaataccttagctttgctgagccgtaactgtgcactgaaggtgcagcttgttacttgaatcagtcatgaccaagagaggccggccattcctcaggaccgtgagactggaaagtcatggtttgccaacaaagacaatttaagccttgctgctcttgacattctagaatggatggagtgcatctggaaaagactggacacagatgatacaggggaatgatgaccgtataccctggagaagcacagcacaggctggggagggggctgcaggggagccctgctcccctgtttagctgcctgggagctagaaagagggccaagagtccagctcttggtcctttctgtttggaccaattcttggcccttttggtagtatgaagagtagcatccagggagattgtccatcagcacctgcagtccagcaatggataaacctgagaaaggcaggaactttgaaccagcagtactcatgggggcatctttagaatttgcaaacgaacagtctagtacttgccctttgctctaccagaacacttgttttggggagaaatgtgctgtttctctttctctctagtagccaataaaattctacagctaaaaaaaaaaaaaaaaa

SEQ ID NO: 201 - DNA, 813 bp, Mus musculus
atgctgctgcggtcgctgcgtagttgggctgcccggtccccgcgtagcgtgggcccggggagctccgggagccccgggagcctcgattcgggcgccgggccgctgtgggcacctcgccgcgcctggcctccggataaagatagagaaaatgataaggagaaaaaagcagtggtttgtattgagggcaatattgcaagtgggaagacgacatgcctggagttcttctccaatacaacagacgtcgaggtgttaatggagcctgtgctcaagtggagaaatgtccatggccataaccctctgagcctcatgtaccatgatgccagccgatggggcctcacactgcagacgtacgtgcagctcaccatgctggaccagcacacgcgccctcagatgtcacctgtacggttgatggaaaggtcaatttacagcgcaagatacatttttgtagaaaacctgtatagaggtgggaagatgcccgaggttgactacgcgattctgtctgagtggtttgactggatcgtcaggaacattgatgtctctgttgatctgatagtttatctgcgaaccactcccgaaatctgctaccagagattaaagatgaggtgccgggaagaggagaaagtcattccgatggaatacctccatgctattcaccgcctctacgaggagtggctggtcaacgggagcctcttcccagctgcagcccctgttctggtgattgaggctgaccacaacttggagaaaatgttagaactctttgaacaaaaccgggcccggatattaactccagagaactggaagcatggaccctag

SEQ ID NO: 202 - DNA, 59554 bp, Homo sapiens
caaacctcactcttgccccagctcttgttcacaactcaatacccaaccattcagatacacctgcaggtcctggagggtcatgctctttctccacctagaccctcacatatgctgctgcttttctagcagaaaagcactttcccttccctgtatcagtcatctgctaactacgtttcatccttcagccctcagtttgggcactttttcttcacagcctactgtgacttggtccctttcccttgctgggttgcatccacgccatcctaggtgtatatctctcatagcacctatattctctgtgttgcttcctgggtgcatttaaagtttctgaggtacaaggtttttgttttgtcttaaccaaagaaccaattacagaatctaggattagcaaatacttaacatttgctgaataaataatttcattagatcaagatcagaaaggattctgggtttcgtaatggagcaaaaacttagttacccatataacaccccatttctaagagatacaatatcagtaaagtttgatccttagagatttggggactattcctttcagtgtgctacatataagctactctctctcagtgtattctgttacactcctggctcccagtttattactgggacatgtaagaaactccaaggaattatgtttggaaaaaaagaaaggctaaaatgtgttagttttattaaactctagagaagcagagtgtgaaaagcaactatacaagacctagaggatgtggaccagtgttcattatcctcttgaagaaatctttagaaaaatttagtttaaccctttctgccactaaatgagggccaactgaggaagactttgtaatctcttctcctagacctccctccaacgaagtccagctctgaagtgtacatcaagtagttttgagaggagaggttctatgaagatcctatttcccagcttttcccttttaggacttttaaaaagcttatgatttgcctgaaatgcttgccactggccttgaaggtggttccagaaggtaccatttaaaggcatgcttatggtttaagaatagctctaaagtcttttcttgttaataggaattatcagcttggatattagcactgtggcatccaagaggatgagaccactgcagccaaggaagacatggcagcaatcagtccagccaaagaggagaagggcagcagggggattcaggagggagacctacagagacaggatgctgggaatgagacttgcaagaggacagaggagaagtcactcagtttttcttagaatcagcttctagtccaggctgaggggctgcatacatcttaacgaataacttcaatctgcccaatttgacagttttcagaaccatctgggcattccactgggcagttattcctaattatatgagtatggcaggttacagtctatatactatgaaatataagaggtgccaacattatttagtaataactacagatattttcaagtgagataacattgtactttagcctccccaattagtttgattttccatttagtgaccaaagatgtgcaaggatagatacttgtgtatctgtctccatctctatcccaattttgaggccatattaacatgcatccaaataggtaataaagattaagaatgcactacaattttgttaacatggtcctaaatttaaatttctttagaagatctatccaagtgaattctaacagaagcgtcagccacatctactgatagatggtgcagagaacttatgctctgtggctgccctgcatccttgagaccctctcccaaagcaatacagggcacattagcaatgggtagagctcctccttcctaagcctaacagagattaccttaaaggtttaagagaagcaaaaaacagagttcattagaatatctcactatggtaggaaaaagtaaaatttaaggatgaaactgaacacttacaagcaaaggccaaaataaccacttcattaatcgatcaagtctgagtacatataaaagtatgaaaaataagataacggtgacttcaaatccagtgataacaatatatggttcaggggcttgtgcgatgataaaaaaggtcatagatgtcacagttagtgcctagaagaaaaaaacccacgatttattcagtgacaactgaatacaaatttaaactgtaaaaatgacaatttctaaaataataggctgggcacagtgggtcatgcctataatcccagcattttgggaggctgaggtaggaggatcgcttgaagctaggagttcaagaccagcctgggcaacataaggagacctcatctccaaataaacaaaaataaccagatactggggtttctgccatatacacacacatataaaacagccatgcctaaagtgtatgatattgacttctctttgtcttttagaggactgggtattcctctctgttttaagtccaattaattattcctcttgtgcttctgacactatcacttcccacatcagttctcttgatgtttttccaccaagtacctccgttcccccttgtactttcaatctgtcctctgctagctccttttctcatcatcctagaaacatctcagttgtgttcttttaaaatacacacacacatactccttccttttatcctgctccccacagaaacccttgttctgttttctactgttgttatgcttcttcaaaaagtctgtatactggctgtctataatttcttaccatccatttatcactccttaattcttaacaatctggagtctactgtcagatttaaacttagaatgctgccatgaaaaatactgaggagcaaagttcaaaacaaattgtcagggtgggcgcggtggctcatgcctgtaatcccagcactttgggaggccaaggcaggcagatcgcctgaggtcaagagtttgagaccagcctggccaacatggtgaaaccttgtctctactaaaaatacaaaaattatccaggtgtggtagcaggtgcctgtaatcccagctactcgggtggctgaggcaggagaatcgcttgaacccaggatgcgggggttgcagtgagctgagatgccactgcactccagcctgggtgatagagctagaccctgtctcaaaaacaaaaacaaaaaaaattgtcagagaaaaacaattctgatgtttaatagctttattaccaaagtaccattttttacacaccccacctaaacaatgcaatcagaatctatgctattttaagtggaaaaaaaaacataaaaaactctgaaatttcttcatttccaaatgaagatacagaacatggcaatgttaagtgaaaaaaatagctggtgggtcccaggggagttctgtcaatgttcttaggaaataaagctctttccaaagctctgtgtttttggtaaatggtttggtcaagagtcttccctggctagacttttaaaatatcctgtcagctggtaacatatacatactcattttaagtccatataggttacttattcataattcttccaattactttattagcataaatatgcctttcttttaaacttctaaactgatcagtttgattacaaataactagttactaagtaacttcattctttataattaatataattactattagcaacacataatctcaaactactccaattactctattggaccaaggtcttcagcccacagattatgaaatgaagggccactttttcagtccctatcctctgtaacctttttcatcatggtgatttgcactggtgattactccatttccttaaacctttctatggtttctgtcaaactgtgttctcctgtgatttatatttacagttcttacatctttcctaagctcctggcctttgtttccagttatcttttacatatctcactaataatatttcagacattaccactctatggatattgcttttgctaacatcagtgatttcagaaatactaaatttaatgaatgcttttttctttttttccagtactttgagctgctgttttacaatgaacatttttcattccttatcctagtggacccctatgacgttattgccattggctgtccttcccctactagtgttttcttttggctcccgtgtcagttctccgagattttaaacctccgcgactgttctctcttggtgggttcttctccttttattctcccctgtaaaatgctgtcattctcattccactcaatgagtctgggtctctaacccaggtccattctccacatttcacaccaagtagccatttagaatccctatctggataacctacaggaatctcaattcaccatgtctaaaactgaaatcccgccccttcctcctggattcacaacctcaactggtggtaccacaatctaccttatcacccatgccaggaacctaagatcactgttcctacccattccccaactgatcaataatcgggtcctgctaacttaatgcctaaacattttgggcactccctcctcttcatccttacaactactgcctttcatcgtcttttccatgaactatcatgatgaaatttctaacatgcaaatttgtttacgcatttcttcatctatttaaaattcttcagtggctctccagggtctttagagcctgcttctcaccatgttttcaagatcttccacaatttggctcctgtctacttcttgagaaaagacttgcttcacaatttatccacatgaatcaaactcctgatccttttttcacatttgctttatcaataggctgtctcatctcagtggatggtgactccatccttccagttgcttagaccaaaaacttcagaagctgtcttggactcctctttttccccacatctggctcatcagcaaatcttgttggtgctactttcaaaatattacatcccaaatgtggccacttcttattacctgctttgctaccaccagccaccatcatcatttcttgcccagattactgcaattggtctccttggttttacctttgcccctgcagcaatccccttctgtccttccctaccaatctactgttaacatagcagctagtatatttttgtttgtttttgagacggaggctcactttgtcacccaggctggagtgcagtggggtgattttggcttacctcaacctctgtctctccggttccagtgattctcctgcctcagcctcccgagtagctgagattacaggcatacgccaccatgcctggctaattttttttgtatttttagtagagatggggtttcaccatgttggtcaggctgctggaactcctgacttcaaatgatctgcctgccttggcctcctaaagtgctgggattacagggtgagccaccgggcctggcctagtatacttttaaaatgtaagttagatcatatactttacttaaaaccttcctcatcttcactcactcaccccagtccagttacgctggtttccttgctctttcttgatgccttcccacacattcctgccataaggccactgcactggattttctctgcttcaaacactcttcttccaggtattctcatagctaactccctcatttcactcaaatctttgatcagatgtcatctcaacaaagcctagaattctattcattacgcaacttttctctgcaactccttccccgccttacactcccttacctggcttttacttttctcgttccactgcacgtaccaccttctagaatactaaaatttattgtgtttgcttcccctgccctcccatcccaataatgtgtactccacgagggcagggatctttgttttttttcactagtatttttcaagagcctggaatagtgcctggcacatgacaggcattacacagattatttgttgaataaatgaggtaacactcaacttcttatatttctctgcatcaattgtgctattttttgcctccatgcctttactcaggtggctcttagatccaaccctagattgctctaggaagagcttttttctgacacctctccttggttagacgcctcgcttctgtgttctatctccatcttatcacatatcttaactatctgctcatgtgtctgtctcataattaaactgaagaactccatgagtcagggatttttgtcctggttcgtctttgctgttccagctcctagcccagagtttggaccatattaagtattcaaatggtttgttgagagaattaatatatcaaaaactaaccattctcacaggaccattctcacatggttcccccttcagtgttcaagatctttcctttttcagtgttcaagatcccagaccttctggtcacttttgccctgagtatttactcccaatcaaaagttatttctccttccctcaactccagagtggtttctaaacctcttatgtatctcaacttacatgatatgaaagctacttctcacaatcacagacttttggtgtgagaaggatcttatatgcactttgttcaacccactcaccttaagtttgagtctcctttataacatcctcaccaagtgctcacatatgcctggtacttttgtctgggaatgtactgccttcccaagtggccatttagttttgggagctctcccaatataagattcctcctcacattaattggaaatgttttccttgtaactttgaactatctccattttgcctctcccatgtcaactctttaaaacttaaaatgatttattttttccttccctgtaaggtttctctgtgaattcctccaatgatgagtttctagaatagattccttcaactaggatagtttccacttctctaactagctaggtcacttctctccaaatgatcaacttcctccaaacctgttcagaagtgactgcagtgctcccggtaggaagtctgctcccggaaacgagcagttctctccttgtcctggttctgggctgtatcagccttgaactcagtcacatcaaacgtctgtctcacggaagtccacacaacattcaccgaaacccctgaggcttttttttttttctttcaaatcttgtgggcttctgagaggtataactgcagttgtctcgcctggtaacctgggtacccggtttgtgggtccaaatgtagaccatttgggtagatctgatttttaatttaaaaaaagggtttttttttgtttttgtttttaaagaggcaggacctctctgtcgcctaggcttgtgtgcagtggtgcgatcaacgttcactgcagcctcgaactcctgggatcaagcgatcctcccgtcccggcctcccaaagtgctgggaccacaggtgtgcgccacggcgccccgccctctctggttttcatgaatgagtgtgtccctaaaccctcctaaggggaggacagtgccgtatctctctccttcttccccaaggaggccatgccttgcctttcaatcttgatcaaagcgaggttgaaaagcaaacaggcgttcagctttgcacttcacacccacatctcccgccccccagcagcttcatcagcctcccgccctccgcggcccggcctcaccagccgcagcatcttcacgtggcctttcacactgaagcagaaggggcgatgttttattttcggctgcacgttatccatcgcgtctgcagacccagcagcagcactttccctcaactcttctcagctggctgcctgagtaggttctgcgaagcgatagcaaccgccaccgcggcggagcaccgccctcccctacttctcgcccagctcggcttcccgctctcttgcgcgcatgcgcacggcgccgcgttcgctctcgcgcatgcgccccaacgggatcccgcggccgtccgctctggcttgtgctgtctttcagttatcgcgtagcacattagcggacctagagctgggcacatattagcggacctagaggtgggcacgcaggccagcgccctgttagcccgccgtgttctggcctggcgttaatgacggcagcactccagctctcctgaggagtcttcctgtcgggaaatcctcccagggttgggagcagaggagagggagggggctgtagaaatggcggccccatctcccaacaacttgggcattgtgaatatcacctccttaaaggggatctcctttggtcatcccgtctagagcagccaccataacttctgagcgtttattgctagctgatatatatcagaaaaatacaaattccacaaaagcagggactggtctgcttctctccctgcagggcccaggttctggcacatagttggtgcagaaagtgtgcagcctcaggtcctatccaagcccccagggcatcacactcgggacttgttctgcatatttttacttttgcctcccactggtactagttcttccgtggaacagcctgagtcccttcagatacttaatgttttttctcaagtgctgccatgaagccagatctccaccgtcttggggcattcctttttagggatgggaagtatatgtcgctccttttatgtgatttacattctatcttggataatttggccatcaccgtagttcattcagatctgtttggatcctgcccatctcagcttcagtccatttcattcttttaaatctgatcgacagttacctccaacagcttcatcacaaatcactcacaaaaatggccttaatcctgaagtttatttacggagagcacacttgctaggtgtgtggcagatatacaggaagcacaagatgaggcagcagatctagaggcaaatgacttccttctccctgcctagtggtgactgccagcatcacgccctcccgggagaggtgagaaacccctccacgcaagcactggaaccttcacagtcaagagtggcaacagctccggttactggacttgggcctgttgaattctaatactctgtgactccacatctgggctgaatttttgctgagtatgatggaatttacatgcttcctccctagcccctacttgtctgtatagttggaatatttggttgcctcctctggagggatctagtacgtttagagtctagacgctggaactgtcaaagttcagaggaaagagctccagctgcaaagcaagagaaatgggctggaattctagcttcaccccttaatgaatgcttctgatttttttttttttttttttttttgagacgtagtctcactctatcgcccaggctggattgcagtggccacgatctcagctcactgcaacctccgcctcccagactcaagcgattctcgtgcctgagcctcctgagtagctgggattacaggcgtgcgctaccacgcccggctaatttttgtatttttagtagagacagtttttggccatgttggtcaggctggtcttgaactcatgacctcaagtgatctaccttcctcggcctccgaaagtgctgggattacaggcccgagccaccgcgcccagccgcttctgatcattaaaaaaaaattttttttttggcggggggaacgaagtgtccctctgttgctcaggctggagtgcagtgcagtgatctcggctcactgcaatctctgcctcccaggttcaagcgattttcctgcctcagcctcctgagtagctgggaatacgggtgccccccaccacacccagctaatttttgcatttttagtagcgatggggtttcgccatgttggccaaggctggtctcgaacttctggcctcaggtgatctgccttccttggcctcccaaagtgctgggattacaggcgtgagccaccgtgcctggccaaaaaatttatgttttaaaaagactagtcaagtgcagtagtgagaaggggggaaagagtagagcaaggagttatatctgttgcttctgaccattttgaacaagttacctaattctctgaggacaagctcggagaatgggagagacagttatctatttgcagggttgttgggaggaataagtgacatcatgagtgtgtgccaggtgtctgattacagaaggtgttcaattaatctgcaatcattaattaacccttcagtcgctggtattatttgccatccatcctccgagtgttgccaagttatgggtgcgttctgccagcgtcctagcagtggtaaggcttctggctgccagcggcgaacctctcccttcgagtatttctcctcttgctgagatgaaatgcgaccgggtctctttaagggccaggcgccgggatccaggcggcgcccaacggctggactagcagtcgtccgcgccgactcgcacaagaaggaaccccgggcctctggatccgctcgcccggctatgctgctgtggccgctgcggggctgggccgcccgggcgctgcgctgctttgggccgggaagtcgcgggagcccggcctcaggccccgggccgcggagggtgcagcgccgggcctggcctcccggtaacgcgcgtcttggtcccgcctcccaggagcccctatgcgcccacctactcccggcccctcggcttccggaacccgcccgagcccgaagcgcctcttccgaggcgcgggatttcctccccggctgcggctgggacgggggcggccatcggccgttacccgggcgcgagaccgcagcgagcgctgggggcgctcggctttggttctgggatggagagagggcctttaaagagcaggacggacacgctctgaacattccggcccaaactcggtcccccgacccatttcctgtcccgattctttcgaccttgggggcgatggggactgggagctgccttaagccgattctgctcacactctggtgccagcgtgggggaggggggttacgcccccggcgctctcctgccctccctgggagtggggacccacacagaaacgggtcactgttacacccgggttctggtgtccgccatatggctgttgagagacgcctcagaaccacctgtgggacggatgggcagcgatgcccgccctgggcctagaggaacacctgggtcccaggcccaaaaccacgtccgccgcccactcttccccgtgcaccgcgagtggaggctgttctgcctttccacttgcttaacatccagtctgtgaagatctaaataaataacgtggaaaatgcaaagtataatgtactaagtgaaagaactcgagcacactgggggtccacgaagctgcagctgcagcccagggtggcacatcggcgagacggtggtgcgcgcctccaatctcggagggcgcccaaaatggaaaatgtttttaggccagggagtgagcataaacattagtgtttttgtggtcatgtagcaaattagggcagaggagagttatttaaaagtgagtttaaaaactgatttcctttcttttgtagataaagaacaggaaaaagagaaaaaatcagtggtaagtccctcttttatgtgtactctctaggataatttggttttttgaagaggagagagaaaaaagcagagtaaaaagcaaaaatacattccatagtaaaaagcaaaaatacaagaggatctccagggagaaggaagtctgtcaccctcctagaaggccacctctgttaccaatttcttgtatctttccccagagtctgcacagataggagcacacaagtatttgtatccttcaggtagatttgggctgttaaagcttaagggatgattgtgaaaggatttgaaaaacgctcattgtgttgtggggaaggtcagtttcatcttgggttgggcagctcagatgtgagggaagctctgtccaccaccaccctctccccccagtgttgagactggtgggtgggcaggggatcagagagaaaccattagggtccacagatgtgggttcagttatcagggtggctttgagatgctggctctgggctggggctgtgactagtgtgaggctgaaggtcaaagaagggtcaggttggtgtccatggggatattgggtgctttagctggctggggtagggagtgatattttggtcacaaaccaaggctcaattccttaaaagaactgaaagtccctagctccagtggctgggaagggggtggcttggcaagtggtggcaggagtaccgtggctgggatctgcagagggtagacagtgcgggcaggcccccagcgtactcagggtggtggagagctcttgggaagtagtgaaaccacatagagaggattgaaatgcttgagatttgtggaagtttgttgaaattaggagaaggatatgccagcgggtgccatagaaggggagggaaatgcaaagttgagctggatggtaattaatgtatttttgtttgtttatacatttaagagacggcgtcttgctgtgttgcccaggctggcctccaactcctgggctcaagtgatcctctggcatcagcctcctgagtagctgtgatgacaagtgtgagccactgtgcctggctatttattagttattgagctagcattgatgtgagctgggcctgttctttgtgctttttgggtgtggtttgatgtgcccccagacacacaatagctagttcatagaaagtggtatggagcctgcattcaggctcaggactgtttgtaaacattcaagtcctgtgagctcctgtgtgggatgcactgggctaggacctgggcacctggcaaacagccctgacatttgggagtctgcggtctgtctgatgggggaggtttgtctgatgggggaggtctgtctgatgggggagacagcagtaactaggagaatggtggaactagaacagcagtgagtatggtggctgtgagtaggggggctgatgactgagaggagctttgggaagccttattgcctgctgggagatggagcagagtttgaggcaggagtgttggaacaggtacaagtcacagaagaatgagaacctgcaggcctgggcttgtggccagtccctagagaggtggctggggagggctgggggataggtgcagagggactgagaataggtcctaaaacccagagtcactgaagggcctcacccccacccagcacgatccgggttgcctctcagggagcgatgtggggaaccatgagtggagggcctaactgggtgagactggaaggggagagaccttaactaaactagagatggcacagagcccgcagctgagtgggaaagcagggcccaggggagttgctggttggttgactggtgttggtgggtgaggagagatgtccagagtgttaaaggtgtctgggtggatggtgcagccattacatggcacagtttacaatattagataattgagtatcacaacaaagttttttaataaaataactggacagaacttaacatccaacagggccatacctaatggctcatgcctataatcccagcacttcgggaggcaaaggtgggaggattgcttgagctcaggagtctgagaccagcctgggcaacatggcaaaatgctgtttctacaaaaaatacaaaaaattagctgggcatggtggcatgcaccagtagtcctagctactcgggaggctgaggtgggagggttgcttgagcctgggaggtcaaggctgcagtgagctgttattgcattgctgcactccatcgtgggcaacagaacgagaccctgtctcaaaaaaaaaaaaaaaatcaaatagtagggagttcaataaattgtgacaggtcttatataatggattatgtaaagccattaaaaaccatgtttttgaaaaatatttagtgacctgggaaggcactcactatgtaaaagatgaaaaaaaaaaataacaaaaccaacaaaagtatatgaagtatgatcccaaatgaaaaaaaaaactgtccttaggaaacaaacaggaaagaaatattataaacattaatgccgaaattctcagtctagttaagagatagatgtggggttaacaaggagcatgtaagagagagtttgtggtgtgatggggtaaaagtgtcttcccttagttatttgaatgttaaatgaaattcagctgggttcctttttaaaacagctttattgtaatttgcataccacaaaattcacccatttaaatgtgcaattcaatgatttttagtaaatttacagagtaaacagcactacagagtaaacaccactacaatctaattttattttattttatttttattttttattttttgagacaaggtctggctctgttgtccaggctggaggacagtggcacaatcacaacttactgcagccttgacttcctggtctcaggtgatcctcccacatcagcctcccaagtagctgggactacaggcacataccaccattcctggctaatttttgtatttgttgtagagatgggatttctacatgttgcccaggctgtgcaatctaattttataacatttccattactccaaaaagaaaccttgtgcccatttgcaatctcttctggccccaggtgaccactaatctacttcctgtctctttagggatttgtgttttctggacgttccatataaaatggaacatatagcgtgggatcttttgtatctggcttctttcacttagcacattttttttttttcttttttgagatggagtttctctctgttgcccaggctggagtgcaatggcatgatcttggctcactgcaacctccgccgccagggttcaagccattttcctgcctcagcctcccaagtagctgggattacagtcatgtgccaccacgtgcagctaatttttgtatttttagtagagtcggggtttcaccacgttagccaggctggtctcgaactcctaacctcaggtgatccgcctgtctaggcctcccaaagtgctgggattacaggcgtgagccaccgctcctggttgcttagcataatattttgacatgcatctgccttgtagcacgtattagtatgtcattttttcctatagctgaatagtattcatggcgtggctgtagtgcactttgtttatccacttgccagttgttagacgtttgggcaagtttcttttgactgcagatttctcagggtctttgataagacaggatatttggattctccctgtggaggctttggcacccaagccagtttgcctctggaaccctgggttctaattaaacatccaaatgacaatgattgctgagatttacgagtgatttttattttcttcttttagggattgtgtaataaggtttgatcagagaaatccaactgataaatacatatatgcatattcataaacatatacatatattcatgcatacatacattcttgtgtgtgagaatgtatttctttttttttttttttttgaagacagggtctcactctgtcacccagactggagtgcagtggtgtgatctcggctcaccacaacctccacctctcagctcccaagctcaagcgattctcttgcatcagcctccccagtagctgggattacaggcatccgccaccacgcctggctaatttttgtatttttagtagagacggggtttcaccatgttggccaggctggtcttgatctcctgacctcaaatgatcccctgcctcggcctcccaaaatgctgggattacaggcgtgagccactgcgcctggccactgagaatgtatttcttagcacaagaatgcttaatttccatttttaggaaagattaaatattgttacttataatagggatagatggctcatcacagtttcagttataatcatggaaaattggactcaagggctcatagcagaggaaaatggagataaattgtagcgtaatcacagagtgttgggccaggccggccatgtgctcccacagcatggggaccatctccttttcacagtttcctgttgctttcctccacacactcatgagctctttggccgttgcaacgaggccctgagtacacagtgcctggcacagcataggccttcaataaacagttgaaacgtgctcaaagatgaggactgtatagaaaataatatttggcatgaaatatgctcatatgtcatggggtttatctcttagtattgggattatgggtgatagtttctcctttttgattttctgtattttcttcaatgggcatgcacttctcttataatatttttagacatcactttaaaaagaaatgtaaagactccctttgcttgcttcctgttcccccttccatttcaggggaactttgtgagattcttcctgcgttgcctgctgtaaaccggagggcagattggctgagctcattcagggcctgacattcaccagctcttcaggatttcatgctggggataggaacaagtttctgggagaagggcttatctgaacaacctgttaaaatgcttcaatgaacaggaaagaaaaaagactgtagagtgatgtctaggttgagctctttttatatatctaggaagaggaaaagttttctttaaagagcaataaaaaaattaaatccattagtgccctaatggggtcttttcatgcccttttgttcattcccttgggttcattttgtagtttggggctctaaaggagtgggctgggagggacccaggatgggagagtggccttgtgtctcctggatacccgttaggatcaaggcaggaggaaccttctccgccagctgacagagttctagttgctggggagactttagtggggtcgggtgagacggcccactgtgacctggtgtttatgtgaggtgtgactgaggctccatcaggagtcgtgagaaggggcctggatgtgaattctaattctgattcttccctagccaagtctggcacttgggtaagttacctgtgttgcccaggtttctctgggtgcttccagcctgagtgcaaaggaacaggcctctgtgcagcaggtcgggcccctctctgtgtgtgcccctggaggatgtctaatgtgttctcaggggacagtttgtcttatgtattggagctgcccgttccctgtggccatctgctggagccagagccactgggcctatgtcatcagcagtgcctggctgagcagagcttggtcagaatcactgggctacaggttcaagggctccagcctagagtctgatttagggtctggatgctacctggtgccacctcatgtttaaccagctcctctggtgcatctgaagcaggcatctgtggactagacagggagaagctctgctccagcctcgtggttcccatccttgcctgcacattgaaatcgcctggagagctttaaaagttactgaggcttggccgggtgcagtggctcacgcctgtaatcccagcactttgggaggctgaggcgggtggatcacctgaggtcgggagtttgagaccagcctggcctacatggtgaaaccatgtctctactaaaaatacaaaaaattagccgggtgtggtggtgggcacctgtaatcccagctactcgggaggctgaggcaggagaatggcttgaacccaggaggtggaggttgcagtgagctgagatcacgccactgtgctccagcctgggcaacaagagtgaaactctgtctcaaagaaaaaaaaagttactgagtcttgagtctcactcccagagattgtggtgtaattggtctgggctgtggcatccctgtagagatttttaaaaggtcccaggtggtcctagcgtatagccagagctgagaaccgctgcctggaataccttctctccctaagatgagttacttctaggatgctccttggtctttggtataggtagacccagaaggctgtttctggcccctcccactagtgccatgaccccctttccctcccacgtgcagtcattgtgagcagagtctaggttcaagctgtccttgctttattgtcttctacaagcctcatttttgttttctgtgaaaaatgttaggacttacccttctcaggtttcagtgaggttacatgtgataatggtgtgttacctgtctcagggcttggcctgtgacaaggtgcttaacaaagtccttgctctttttttcttctcccctttcctaatggtttccagtcagtgaccaagtgctttttttttctgtaaagcagtgaattcgattctagataacatatatgtgtttcctagcctcaaagccattgattaagctctcgttaaggaggcaggacacttaggcctaaaatctaatagtctgtggggttgaactaaggaagggcagagctgggctgggcagacaagctgtgtatggtttaggagttgacgtaaaggaggatctggtctggggggaccacatgagcctgccactcagggaggatcggcttatctgttattactaacaatgggaccttgccagtttcccgaggagggattttggtttacatgtgaaagtcttggactgaaccaattatgctggttacatgagccctttccgtagccattattccctgacattcccctgggtgcttgagttctggctctaatatgcattcgtcttttgccagatctgtgtcgagggcaatattgcaagtgggaagacgacatgcctggaattcttctccaacgcgacagacgtcgaggtacagcctctatgctaggtttgaaggaagcggagaaagcttgatgggataatttatagagggtgtggactaaccttgtccaataggactataatttgagccacaagtgcaagccacaggtgtaatttaacatttctaatatcctcattaaaaaaacaaaaggggccggtgcagtggctcaagcctgtaatcctagcactttgggaggcggaagcaggtggattgcttgagcccaggagttccagaccagcctgggccacatggcgagaccccatctctacaaaaatatgccaggcatggtggtacgtgcctgtagctccagctacttgggaggctgaggtgggaggattgcttaagcccaggaggtggaggttgcagtgagctgagatcacgccattgcattgcatcctgagcagcaggagtgaaaccctgtctcaaaaaaagaaaaaaacccacaaaaaataaaaaggacattttatttcacataacatatgccaaatgtgatcatgtcaacatttaatcaatataaaaatcatcaatgagctattttgcattctatcttgttatactaagtctttggaatatgatactggttgagcatcccttatctgaaatgcttgagaccagaagtgttttagatttcagaatttttcagattttggaatatttgcataaatgtaatgagatatcttgaggatgggacccaagccaaaacacgaaattcatttatgtttcatatatacatagcctgaaggtaattttatacaatattttaaataattttgtgaatgaaacaagtttgtgttaagtatttatgtgtggaatttttcatttgaagtgtcatatcggtttccagaaagttttggagtttggagcatttaggattttggatttttcaattagggatgctcaaactgtttgtatttgtaaaataagtgtaacttatagcatatcttaatttggactactcatatttcaaggtcttaatagttgcctgtggctcatggccactgtattggacagtgcaagtgttgactgcctcaaagtctggttaggaaaagagtctacatgggtaagaagaaaggacaggctattgagcagggctagaagtgtgacatctgagatagcaatgtctgagcagtgggtattactatgcataggcaattaatttaatttctagttcatttaaagcctagtcactaaaactaacctcagagatgtttaagaatcatctctacactaagacattgacctgtcttccttgttctagattttagtggtataatcttctctattgatggctctcttttgttactacagaagctacaatttctatacttttatagtcattttctttccttcttcccttcctttcctgtttttacttctgctagaaatatatgcatggccaggtgtggtggctgatgcctgtaatcccagcactttaggaggctgaagggggaggatcacctgagcccagtagtttaagagtagcctggccaacatgacaaaaccacatgtctacaaaaaatacaaaacttagctggatgtggtggcacatgcctgtagtcccagctgctcaagaggctgaggtgggaggattatttaagcccaggaggttgaggctgtggtgagccaggactgtgccgttgaactccaacctgggtgacagagtgaggccctgtctcaaaaaaaaaaaaaaaaagaaaaaagaaagaaagaaaagaaatatatatagtttgataaaaataataataaacattatatagcccttgtcctgctgtgttcatgtgctgctgtgcaggaaagagttaacatagcagacctaagactgctgccctttagaaatgcctgcttgcaagggtggtctttggctggcatctgggaacttagatcttgggagggcccccaccattcctaactgataacagtggctctctgcttaaattgtttctgcaaacagtatggtttatgctgacacctgctttcttcctgggagtccggaattttggtacatgtcaggaagtggttgtctgcatggctgagcgctgatgaaaaccctgaactcccaggttcaggccagcttgcctgctagacaacatttcacatgtattgtcacatcttgttgcctggggaattcagtgtgtactgtgcagctcctctatgagaggacccttggaagcttgtgcctggtttcctccagactttgcacctgccctttttccctttgctgatccttttttctttttcttccttttttttttttttttttttttctgagatggagtcttgctctgtcacccaggctggagtgcagtggcatgatctcggctcactgcaacctccgcctcctgggttcaagcaattctcctgcttcagcctcccaagtagctgggattacaagcacccaccaccatgcccagctaatttttttgtatttttagtagagatggggtttcaccatgttggccaggctggtttcaaactcctgacctcaagtgatccacccacctcagcctcccaaagtgctgggattacaggcgtgagccaccgtgcccggtcccctttgctgatcttgttttgtgtcctttcggtgtaatccatcttagctgtgagtatgactgcgtgttgtgtcctgtgagttctcatgaatcatcaaacctggggaggagggggggcttggggactcttgacccctgtcctgagtgatatgactcttaatggcactttagaagtgcttatagtctcactgaagaccttggacccgattaacaacgatagttaacatccagtgagtatactgctatttgcccaacactgtgttgagggttcatcataaatactaaatgatctcaccctcacaagaatagtccctctgaagtaggtaccatttttaccacagttttagatgaggaaaccatggcctaatgaggttaagtggcttgtccagggtcgctaggccagtgtatgatacagccagatcccagcccggatacagccagatcccagcccaggctgtctggttccaggggccacacccttgtttgattctgtggtacgaagagctttgttggctttaggaagaccactctcccttcagatctgagctccgtgtcccctgaccttcccagcgaggttatgcttcctgacagaggatcccctggccgctctgtacctctcttttataccacttcttggggtttgaaaacatgttggcttctgtgattacctgagtaatgtctgcttcccctggtaggcttaaggttctgtgaaggcagaggctgggctggttttgctattgttgtgtcctcagtgcctagcatggatatctggcacacagtgggcactcaataaatgtttgttgggtgacagtgctatggatggagcacccctgagctgggtcggggagcaaggctgcctgtgacccagactctggtgggcctgtgtggtgctgtgtatgctacttaggggctaggaagaagacctagaagaaggagagggggtttgagaggggcaggggaagggcatatttgaactggattttgaagggtatacaggagttttccatgtgatgaaagttgatgtgaagtggaatggggtgggaatgctggtcagaagaaacaacgtaagcaaagacacagagtatcttgcttgagggtggatcacttgaggtcaggagtgaagggtggggggtgattacttttcttttctttttagagacggagtcttgctctgtcacccaggctggagtgcagtagcgcgatcttggctcactgcaacctttgcctcctgggttcaagtgattctcctgcctcagcctcccgagtatctgggattacaggcatgcaccactacatccggctaatttttgtatttttagtagagatggggtttcaccatgttggccaggctggacttgaactcctgacctcaagtgatctgcctgccttggcctcccaaagtgctgggattacaggtgtgagccactgcacccagccagggtggctacttttcaagagttccatgcattgcctgccattggtcttttgtcacctatggccccttctcacatgtactctgaaagttcccagatggatcctggcactctgaagatcttggccccaagaacaccatttaaatcttttctagcacacacctgcatacccagaaaggctctagcagagtctggggttgtcccagatttgtgtgtctagaccacagatggaggctctagaaatgcccagcagagatcctgatatgtgtctgaaaacacacaggatgttggagagattggcagtcatcctaaaaggtacaaacaggaccagagggaaagaatgcctccaaaccagtgagacagggagcgtactaaagaaacagggactatcagcagccagtgcacccagtgcagtgatcagaggcaggaaacggaggcaggtggcctgccaaggcctagccctgtccagtgtccctcctggcttctcccacccacctgccagcttgatgtggtaggcaggcaggggtgggatagaatacacagaagagggatggacagagccagctctgaccttggggaggctaccagggcaatagagaggtaggatgtacctatgcttggcacattgggtaacatggatagagttattctcaggacatttctggaagtaatgtgaggaagccgtgtctagatagagttgtgacctcacgggggttgtcagctattttggcctaccttgggcacccaaatttggatagtctttttctctctttttcccttctctcctcactttcccctcaacacttacacacttttacagggttcagcacagagaaacagtagctctgatgttttctttccttccaggtgttaacggagcctgtgtccaagtggagaaatgtccgtggccacaatcctctggtgagtgggttgttggttgcatgaacccccggcttccccttaagcacctgagaatgatggtgcctctgcctgagccctgcctgcccaggcattctctgcgctcttaactgagttggagaagaccagggagggacaagcagaaaatggtggcatgttggtgttctgaggtcaaggatctctgaggcctgagtggctgtgcacagagcctagggacttcccgtcagctatcccatactattcccagtggccgaccttagccactaggggtgtccatttcttgttgctcattccagccttcccctcccctagaagaaacctatcagaacccgggacttctcaggcctaacccccccaggacctatctctaagtaaccaggatccttggtggacccctgacttgggtttgcaaacttggccctgtctggtaacaggggccacctctggcttacctggaagccaccagcctgctttcccaagggtgaacctagcaacaggggctgtagtgtgctgtgtcccttccttcaccttccccaattcgaggttctgctctggttgcttgaaagagatggatagaatctgggtcctgcaagagagagctttagaagaggatgttggttctgagctcccatcccatgaggtagggatgattagtctcatttttcagcttaggaaattgcacttatataagttgcctgaggtcacacagctagtaaatggacttggaagcctgtgctgccctgtgattttttttttttttttttgagatggagtctcagtctgtccctaggctggagtgcagtggcgcgatctcggctcactgcaacctctgtctcccaggttcaagcgattctcctgcctcactctcctgactagctgggactacaggtgcgcacgaccatgcccagctaatttttgtgtttttagtagagacagggttttaccatgttggccaggatggtctccatctcctgaccctcatgagccacccacctcagcctcccaaagtgctgggattacgggcgtgagccactgtgcccggccatgccctctgatttttagcaacacaattggcatctcctgtgtggttcattagactctgagttctactaggagcagggactgtatctactttgttcattgttatttgctaaaaccaaggcacactgcctagcacttagtaggggcttgtgcattcatccattcattcaaccaatattcagtgcatgtcagccatgtggcagacactgttctggatgatatggcagtgataaattcaaagcccttgctctcctgcccctaatattccagtgtggggaggcagaagtcaaacatataatctggcgggtggtgatagggcctaggaagaaaactaaagcaggtgaaaggatgtttcttaaataaggcaaaacctctcagtctttcaataaagaatcctaaagagacatgagaagaatttcttctctgtgcattcgggagaagatggaataccagtcatcttctttggatataacaaagaaacctctgtaacattcatattctctagaagccaaggaggaacccaggcttagttattaagtaagacagctagagttgcaggtgttagggatcataagtgacgtttcacgggacagaatcacagcctcagaagtcttagtgtccttggtacagatagccttttcaatgagagtttcctaataaaaaatacaatagaagtagccatttttatataagtttccactctagaccaaaagaaagatcgatacttttgtgaaaaatctcaattcatcactttatctgaattggttttctgatgcagaaaggtgactgtttctgcggccatcaggcaagagggagtgtttctcctagcctttatgagattttctctcaactgcagtcagaggagtctgcagttctcaatgaagaacactggagtttcattagtttgcaccaagagaaaaatgaaaagcaaaaatgaggaaaaggccgggtgtggtggctcatgcctgtaatcccagcactttgggaggccaagatcagaggatcacttaaagccaggagtttgagacaaccctggtcaacataatgagacctccatctctaaaagaaataaaagtaaataaaattaatttaaaaatgaggaaaggagcagaacaggtttcttagcaagtatgctggagcatgaagtgttttgcttctagaagggatggagagtgattgagtaggtgggttggcttctgttttacatgagataaccagggaatgtgtctatgataaggtgcttaaacatgagggtgtgagcactgcagatatctggatgaagagtgtttaggcagaaggcgctgcagaggcaaaggccctgagatgggaccatgcttggcatgtttgaggaatgctaagtaagctcatgtggttggaagccaaccaggccagagggagatgggtaggagatgagagaaagccttgtgggccatgataagggtttggatttcattctgcatgcaatgggaagccactggaaggttctgagcaggggagtggcaagaactgatttaggtttcacagactcactcttgtggctggatagagaacagactacagagggctcaaagaccattcactgaacgacttgaacgcatgttccttggtgattttattttattttttgaatttccaaagaaaagtaatttattttttgcagttagggcagctgagaagtccagggttgaaggggtgcatctgctgagggctttcttgctagtggggactcttcagagtccccaggtggtacagggtgtcacatggtgagggagttgagcatgctaggtcaggtctctctcccttttctcataaagccaccagtgtaagataacccattaatctattaatccgtgaatagattaatccattcaagagggctctgtactcatgatccaatctttttttttttttttttttttgagacagagtctcactctgtcgcccaggctggagtgcagtggcgcgatctcggctcactgcaagctccgcctcctgggttcgcgccattctcctgcctcagcctcccgagtagctgggactacaggcgcccaccaccacacctggctaattttttgtattttttagtagagacaggatttcaccgtgttagccaggatggtctccatctcctgacctcgtgatccgcgcacctcggcctcccagagtgctgggattacagacgtgagccaccatgcccggccgatccagtcatttcttaaaggcaccacctgctacatactgccacatgggggattaagtttccaacacatgaaatttaggggattcattcaaaccaaagtattatttgttaaagatgatcttaaagagcttaacttctttaaaaattttaaacttatttatttatttatttattttggagatagggtcttgctatatcacccaagctggagtgcagtggcacaattatagctcactgtaacctttaactcctgggctcaagtgatcctcctgccttgggctcccaaagtgctgggattataggcatgagccactgcacctggctctcttttctttatgctagaaacattcaaattattctcttatagctttttttttttttttttttttttgagatggagtctcgctctgtcacccaggctggagtacagtggcatgatctgcctggccagcatggtgaaaccccgtctctactaaaaatacaaaaaaatttagctgggtgtggtggtgcatgcctgtgatcctagctacttgggaggctgaggcaggagaatcgcttgaacccagaaggtagaggttgcggtgagctgagatcatgccactgcacttcagtctgggtgacagagcaagactctgtttaaaaaaaaaaaaaagatttttatcaaaaagacaggtgataggtgtggagaaaggggaaccctcatacatagttggtgggaatgtaaattagtacagctactatagagaacagttatgaagtcaggcagtgtgatgcctccaactttgttttttttgctcaggattgctttggctatttggggtcttttgtggtttcatatcaattttaggattttttttttccctatttttgcaaagactgtcataggtattttgatagagattacattgaatctgtaaattgctttgggtagtattgtcattttaatagtattagttcttctgatccatgagtgttgaatatctctttttttgtgtgtgttctgttcaatttctttcatcagtgttttatagttttccttgtatagatctttcacttctttggttaaatagattcctaggtattttacttttattaattaattaattaatttattttttttttcgagacagggtctcactctgtcatccaggctggagtacagtggtacgatctcggcccactgcagcctctgcctcctgggttcaagcgattctcatgtctcagcctctagagtagctaggaccacaggtgcgtgccaccacacccagctaattttttgtatttttaatagagacaggatttcgtcatgttggccaggctggtcttgaactcctggccttgagtgatctgcctgcctcaacctcccaaagtgctgggattacaggcatgagccactgtgcctggctggtattttatattctttgtagcatcgcaaatgggattcctttcttgatttctttctcaggttgttcactgttggtgtatatacatgctactgatttttatatgttgatttgtatcctgtggtattactgagttcgttcatcagttctaacagttgtttggtggagtctttaaggttttttttttttttttttggtcatttcaacttttattttacttttagcggggtacatgtgcaggtttgttacctgggtatatttcatgatgctgaggtttagggtatgatggatcccatcacctaggtactgagcatagtacccaataggtactttttcaacctttgccccctcccttcctccccactctaggagtccccagtgtctattgttgccatctttatgtccatgagtacccattgtacccacttataaatatccacttaaagtgagaacatgcagtatttggttttctgttcctgcattaattagcttaggataatggcctgagtctttaagcttttctaagtgtaagatcatgttgtccgtgaacaaggttaagatgacttcttcctttccaatttggatgcccttcatttctttgtctggcctaattcctccggtccctcggagactttccataggctcctattatagctgttaccatactgtcctataattgtttcagtgtctgcctttgtccaccctgctgtcagagccctgtgatcatgctgggtttatctccagccccaaccctgcctgtgtaggtttcttgagctgtccttcagtgccttgtgagaccagggtcctcctgcagatgccactttgatggaaagtgctgtgttttcccttctgcagggcctgatgtaccacgatgcctctcgctggggtcttacgctacagacttatgtgcagctcaccatgctggacaggcatactcgtcctcaggtaggtttcagatgctcagtttcagccttcttaaacgttttcttcagacttggggtatgtgattgccaggaagggaaactttacaaggaagccaggctaggccttcagtgctgtgcaggcctctctgtgtggggccaaggtctctggcttctgtggttctcttctgacctgcctctagtgcccccacctgcaaacctcagccagccaggtggtgcccctgccaccattctgagctcacatctttatgacctgaccactgctgggcttaatgccgtttaactcagttcttctcaaagtgtggtccctggaccagcagcggaagcatcacctggaaacttgttagaaatgcacattttcagctgggtgtggtggatcccacctgtaatcccagcactttgggaggctgaggcatgcggatcacctgaggtcaggagttcaagaccagcctggccaacatggtgaaaccccatctctactaaaaaatacaaaaattagtctggcgtggtggtatgtgtgtgcctataatcccagccacttgggaggctgaggcaggagaatggcttgaacccaggaggcggaggttgcagtgagctgagatcataccactgcactccagcctgggtgacagagtgagactctgtctcaaaaaaaaaaaaaaagaaagaaatgcaaattttctagtcacatcccagacctgctgaattagaaattctagggatgaggcccagcaatctgtgttttatcaagccctccaggtgactcgaatgcatgctttgtttgttttcatatttgagaaccacttatttaaccttcatggggtctggctcttagttcaaattcttgagacaaagaatctgattggttcagctttggtcaggtgtccagccctggttcaatcaggtgttggggacaggaccccaaggcacaaacatggctgcttaggcctattccatcagtgaggatgcatctagagacagagtctcttagaagaaagggggctgtggaggtcctgatcagcacctatgtttcaaagctgtaagcacaacctatgatgccagctttaaggctctgcatgaaggagacagactgtccctacagccagttaacactggcacagctgctgggctggacagttcggtcccagtctgggtacctgcagcaatagctaccattcttctgtaagtctgtcttttaaaattgaaagatgtgagtgggccgtttttggtgaataagaatttccatctccccaaatatctgtctaaattgcacaaatccacaaatcgaaagatctgaggttagtgcattttgcctttgctaatttgcttttcctgagcaggcactcaattgcaaacctaagttgtatctaatgatatttgaataggaagggatataaatgcactcctctatttaaggaaatctacctcaggaggcagagagagatggacagaccaggaaagatgagcagaaggagaccagagggatgaatggggagctaggaagtaaggaaagagaggatggaagaatggaaaggaagatggatgggcagaggatggatggacagagggacagcagggagagggaggaagtgcctgggttatggctttgaatctgccttggatttgttggcccaggtcccatgggtgctgtgggccatggccaagtgagagtagtgttagtgtgcctggcatcaagggtcagggcgcctcttgcttcccagaggaacgctggacaaagggcaaggtcgtctgcagagggtttgagcatcctggcagaaaggggcactgtcaggctgtcttcctccctcttgggcatcgttcttaccagtttccttgggcagagcccccagaacgtcacccccaacccgaccctcttggggctgtacctcatgcatgtggtccctctgcttaagcaaactcaccctatttaggtccgtggtagtcaccacatgttgcctcaagtggacagctttggatggtttctccagggcttgaccgtgttctagttgagactcacctgccatcaaagaggcagctgctgatgagccctcagcctcggcattgctgggccatgcatgcagctttggggtgtggggcaggtcagggtggaagggggacacagcctgagcctggtggcagatgtggcttctcctcccggcaggggagtgaggaggtcctcctgcttcactctctctgccgccttgattctcatattcagcaaagtccccaggcagggggagtaacagacatttctcaaggcctcctggctgtctccttttcccctgagttagtgattctctttttgttttcctttaggtgtcatctgtacggttgatggagaggtcgattcacagcgcaagatacatttttgtagaaaacctgtatagaaggtactgtagtttgaatagttgataatttattaaaccactaatttttcaaaatgaaatagaaacttgtttattcgattgacagatatggagtacccgctgttgtatcagttatccattgccatagcaatgcggtgtaacaaacagccacgaatcctcatggcagacagctatctgcattcattgcccagtcagccagggtggtcaccaggcagctctgcttaccttggctaggctcaatgagatgtctggggatcagccgatgtaggatagcctaagcaagggtgactggaggtggctcatctcttttcctcttgcctgtcactctccttctgggaccagcaaaccagcccaggtgtccacttctcacggtgacaaagggtagaagcaacagcagagatgcaaggacatatttttcaggcctctgctccaagtttgctagcattccattggccaaagcagatcacatggtcacatgagcccagggtggaaaggtgggagggtccagtgagttacacagcatggtacaaggctaaagggaagggtggagagttgggcgagtcagacgcacagtgtgcgtcgcatttgttgtgtttttcactaaaagcttccctcatgagagcagactctgtgatgtatacctagttaggggcttctggtggcctgtcagtgccaagggctcaggcatggggccctccatccctgtgctcagagactgccgatttctaggggtcttggaaatgggttgcagaccccacctgtccctgccgcgagcttgggatactgctgtccttccctcgcagagctgttcggatgtcaacgctggaggcccttcctcccactctcatctgcagctgtcttcctaaatgccaccctgtctcccagccctccccgaccacgctgtctagatagggcaagctccttgttagtctttgtttcgtttttggttttggtttttgttttttgaggcagggtctggctctatcacccaagctggagtacgggggcacgatctcagctcactgcaacctccgtctctcaggctcaagccatcgtcctgcctcagcctcccgagtagctgggactacaggcacacaccaccacacctggctattttttttgtatttttagtagaggcaggatttcgtcatattgcccaggttggtcttgaactcctgggctcaagtgatcctcctgccttggcctcccaaagtgctgggattataggtgtgagccactgtgcctggtccccttgttattcttaaggactactttctgttagttttctttgtagtatttaaggcaatcatatgaaattgtttaaccaattatgacctacaaaaatggcagttttgtgtggttcaacttagtatgtgtctaattgtttattgccacccacccccccggaccataagctcctaagggcaggcaccaagtttgttgtccttgcctagggtggacccagcacagagcaggctcctcgttgatacctgttagctattgttggatgaggggacctgtggctgtgctttggtctccagcccaacttgttccccaggctctggtcccccactgttttgcacctttcatttgaggggccactaaaaaggcttctcctaggagccctgagctgccatggatcatgcctttgagcctgtgtcaccccccaaaatgagagcctctgccccaaatccacccagagcatcagagcaatgctgtgggctcaggggctggcagccaaggtgagtcctggccgtggctttgccccctggcctcagacttttcttgtgggctgcagcttgccctctgagcaggtggcattcctgaccttacggccccattttcacctgacaacctgggtttccaggtgtccactgctaggtttatccagccctctgcggtcctcagctcctgctccttagcacctcagccagagggaggacaggcaggacagaggagagcgagagcagaagggagcctctgttatgtttgtgtactgctctgattagaactgtaacccgaggcggaggttgcaatgagccgagattgcgccactgcactccagcctgggcaacagagcgagactccgtctcaaaaaaagaactgtagcctgaggaacagatcttggcagtggggtgggattacctatgaacctcgcagagtggggctgtgtctgtcttttaatcacattcagcttggcctgttctgtgtggggtcagtggctcttgttgctttttttatttttgagatgggcttgtgctctgtcacccagactgtagtgcagtgccatgatcatggctcactgcggcctcgatgtcctgggctcaagagatcctcctacctcagcctcctgaatagctggacctacagcacatgtcaccacttctggctaatttatttcttattttttgtagagacagggtctccctgtgttgcccaggctggtctcaaactcctgggctcaagcgatcctcctgcctcagcttcccaaagtactgggattacaggcatgagcctgattacagctctgctcggcctcgtggctctttttgaagcaagtaatctggaatggaatgaccagaggttaaggggagaggatagagtgtggcatttggtgggcctgggttctatcctggctctgaagtttgctctgtttgtgagcaagaccaagtttctaaatttctctgagcccatctctcatctctgattcctcttgtccatctctgaagagcctttggacctgccacctccttcgtgtcttaggacccttttgtgggtccttgcccaccttggtctttattaaatttgtgagttccccaatcctacccccaaacctgtaggccacccagcgctaggtagatttccccaggagccatttgtctttgtttggccggtcacagttcctgctgatggccatgggctttggtaactcacgcccatggtcctgcatcaccacatttctgatgcgtcagttctgtatctcccaatctctgtggttacggcattggtctagatgacatgggccttgcctggagctgttctgtgggtagtttaggaagagaatgtagcttttaatttttttagctcttttcctgtcctgatgactttatatttatgtctctccctggccctcccagaatgcatggcctctgtggttaggatttctgtgggacaatgaaccacagaagaaacttacagtgtcctttctgttcttgggatctaattgttttaagttcatatggctttcggggggctcagattcccctgaagaccttgttggggccttgagatccatcactgggatctcttgaagccaaaggctctcagtgggcatgtggcctcgggcactccagaggctactgggagcactgtggctgcctggagggccaggctatctaccatggtctccagagagatgagaaaaggcggtgttcctcagaccctttcatcggattcctctgaaggcagaggaaagctccccacagcactgcttcctcatcctcccagaccctgtggtccaaagcagccacctgccaacaacccagaagtttcttggagtctcctattttaacctagaattcattgggattttgcattttcctccataatatgttcttaagtttgtatctaaaaataataatttacataacttatcattgaggacaatggatgttcctgtattaaacaccatgctttgcatgtggcttggagttcccactccctcagccacataccccagagtccctaagtccaggaggcagagaaccaaggggtagcggcattcaaaacaccttcccagggcaagtgattcacttgtgaactgcacctgcttatgtgttccctggaaacgggggcatctgctctcatggttaaggaacagggcagggacccatggacaggagctgcatttactgtctggttgttgaccctattgggcagataaggaactgagaaaggattacaaagccagtgctccttcctgatcgggcaggaactaaccacaggaggggaaggtgttccgaaccctgctgtgtgggggcaagcagcaaatgaggaagtggcaggaggcatctagatttctctcatcaaggccaaaggcttcagggcccactgggttccccaaagctgagaatcctgaggtactagcccaagggggagactctgcctctttccagacaggctttaccctaagcttctcccacaaccacctgtgcatcttgtttacaggcagattccacttcagtagcactgaggtggggcctgagaggccacatttctagcaggtgcccaggtgggaccatactcctactggtcggggatcacactttgaggaatacgggcctcagaagaaggtggcagggccgggtgtagtggcttatacttgtaatcccagcactttgggaggcagaaggggaaggatcacttgaagccaggagttcgagaccagcctgggcaacaaagtaagactcccatctctacaaaaaatttaaaaaattagctgggcctggtggtgcacatctgtagtcccagctacttaggaggctgaggcaggaggattacttgagcccaggaggtcagggctgcagtgagctatgagcataccactgcactccagcccaagtgacacagtgggactttgtctcaaaaaataaaaataaaaaaagctggtagccaggtggtccacagggcgccctccatcccaatgccacgacccttttcccctggagttctgacggtaaggtgggcttccttggggcttcactggacctttgggggtcataagaacaagagcctcggcctgagggttgtctttgggaccatggtgaaaagttctgcgcagtgcaggatttcctgtttcctgcacctggcctgtggtttcttaatttcacatttgttgcttcatatttgggttgctgggggctgtgttgtgttatctttgtttttaaggtttctggacttattcctaggccaagaatcaggcagccatagggcaaagtaaaaagtatttttagccagagccacagaagggataaagggaaggaagactagagcttggccactctccggacaactccagctgccctcgatggagcggtcatccacaacgaagtattactgagaaagtagatgtggggtttttttgttttttgttttttgtttttttgattttgagacagaatcttgctctgttgctcaggctggatcactcaggcgatctcagctcactgcaacctctgcttcccagattcaagcaattctcctgcctcagcctcccgagtagctgggattacaggcgcccaccaccacgcctggctcatttttgtatttttagtagagacagggttttaccatgttggccaggccggtctcgaactcctgacctcaagtgatctgcctgcctcagcctcccaaagtgttgggattataggcgtgagccaccatgcctggccaaagtagatgtttttagaggtttcggctccttcaaaatgcagattactgtcattgtcactacctatgcaaaatgtagcatagaactgactttggctgggtcctttgcccatacctagaataaggtgtcttggttcccacctgcagggagttcagccaggtactgggaaccacacggtggcatgtggggcgtcagctcctgcctgggagctcgtgtttcctcatttcctgggatgctctaggaaaaggcttcccaaaatgccatgatggggagcccttcacaaggtgggagggcacattaccattgccccttcagtgcttgggttgatctttttctccctctcagaagctcttgcaaccttggttcaggatctgtgggggcctagacagaaggctatatggcaggctcaggtccccagaaaagcccacatattggaatcctgcatctcctcgaagtaaaatttcttgaagggtgttcttgctctttgggctgtgaacaaatgaagagctcgccagggaaaagacccacctcttctggcactgtctaccctggcgaggttggggtgtgcagaatgtaactgcagttatgccaccagggattcgagagggctgtgttaattgctggagaggaagattccagttacacagtatccttaaagacgggaacttctttttcttttttttgagacggagttttgctgttattgcccaggctggagtgcagtggtgcaatctcggctcactgcagcctccacctcccgggttcaagcgattctcctgcctcagcctcccgagtagctgggattagtcatgtgccacaacgcccggctaattttgtatttttagtatagatggggtttctccatggtggtcaggctagtctcgaactcccgacctcaggtgatctgcctgcctcagcctgccaaagtgctgggattacaggcgttagccattgcgtctggccaaagacaggaacgtgtaaggggcaggcagctggctggcatgaaaagctgaaggtggtgagcaagattcatgtagctaaagaggccacacaggtgactgtgtgggccgagtaatgggaagcaaaggttttacaagattgcctggtcgtccttttctaagaacagaagtgagggcgtggagtgggacccagctcgggaagtggcatgctgactcacctgtggcttgtggttggggacactgagtaagacctggtgtttggaaccacaggctgggcctcctcccctgctgattggcccaggggcttaagttcttcccagctcctgtctagactgaaacctcctggtgtgggtcatgcgcctaagagctgtggccttcctggagctcaggctagagagacactggacttgatccgagtcagctgacagactggggtgggcgggtggtgcaatggagagcatttgggtttgggggtagggagagccaggcttggacccctgctcagacagagttggccttcacttctctgatcctcaggtttcttctataaactgggactgaagccagcctcacaaggtcttgtgaaaacaaaaggaaataacgtatacaagggagctcttccattccattccgcacagactggggggctctcttggcctcagggaaggatgcaagaaattgtactgatgtaacagcaggattcatgtggatcaagaccttggttttgcccccttggggtcagggcaagggtgagacccccatgcccactgttgagttgtgtgcttggatttgccaagcttggatttgcttggtattgctctccgtgcattctgtagaaataaaggcagtggcttgtcttgtcggtggtgtggggagccccatgcttgagacagacacaggaggagctgggcagagttcctaggaggaaatacagttagagcagcgcccactgtgccccatgtccctcggagtcatggagatcaggcttctgtttcctcactcagctcagacactggtcattcagtcctcctggatcccccagcctcttctggcacatggttctagtcatggaagggttttcaataggtctggcctactgaccctgcccatgggaggccacccgaccaaggaccccttccaagagcattgggaagggagaggctgcccctcagtctgcaccaaccctgtgggggaagccttttgtttggctgtgatgggggtgggagtgggaggcccctgtgactacctggagccgattcccaggggagctgtggcaggggcagagccaccggagtctgtcagtcccagagtcccccacaggtgtgaccccctccccatgtctccatgtgcagacccccgtgtactgtgactgttttgcagtggtggttggtttggttttagttaacactgcttcatttgttctgagctgtggttcagttccatgatcatatctgtgggcaccctcccagctctgggattggacagagtctccctcgagctgtgcagacgcatgaggtactccggtggctagtccagccttggacacttgggagactgtcccatgggcagctcagcttctccccagttgctgctaactggccccacccctttggtgccacctcttctgtgccctcaagccatgagtttgctggagtaggcgagaagctaatcagcagcttcctcattgcacatcctcattttcttagagtcaattttgttctcagtcttctttttccagaaaaggaaaataagagatagtggtttggtttcttgaacatcaaatattcggagctgaactaactgaaacccaactcagggtagcctgaacaatgaggtgtcatcaactcccaacagatggcttatttggtgcctctggcctggtttctctacattttgctactgtgcatcctgttcgtgtcctcatgcagttctctcagggtgacaatgtagtcgtggcagcattgggcttctcactcgctggttggagtaagggcaggtgtcttgctagtggctcttccctaagcgtgcggaagtatcttttctgtaagtccctgcaaacctccctcacgcctgcctaatccaaattgggcccctggctgggggaggccctgcactgattgacttagcttggcttcctgaacgcattgctggaactaggggagacgacttcctttagaccgattgtgcctaccctaaagcttggaagcttggggtggggtgaggtttccctgaagcccttgggtctgtggatggaccctgaataaagaatgggctacttttaaggaggtaagcggagaggaggcagggaggcagcctgtggacacaaagttgtcacctgaacttgtagtgcctgagttttgttgcctgggagtcccctctgcaatgctgtaggatttccttcccactcctccagcctcccacgcagcttctccaggttttctgggagtcctggccgtcccacaggttggtctgccctggcctctgtgctgcagtctgctcaggccccgctgctgttctccgtccactctcccgctcctctgtcaaatactcttctcttctgaggacatgggggtggtctcagagactaggggagaatgtccctctccagttggtgccatgccttgctgttagggccccaagacagggctacttgtgcccttggcctcccagagtgcctgcctcactcttccagcctcttacttccttccatgctcatcccctcgtgggactggagtcagcccctccctgccccctccccactgagagcctcccattgcacatggctcaggtacggccactcccccatggccagtcttgccgaacccagctctgagcgggacccacatggagccactagtggaatggaggatgttaaagggagaattcctctgctaggcctgtgagggttgtctgcctgctgatgggcttgtgccctccagctgtgtccattcctgctctctctttcctgttcatttcctcccagggcacaggaaacccacaggaataccaggaatagatgccagatttctccttcaccctggctcgttcttccttcccactttcttgcctttttttctttcttttaaagttaacatttaaaatgtgtagtaggccgggcgcagtggctcatgcctgtaatcccagcactttgggaggccgaggcgggtggatcatttgaggtcaggagttcgagaccagcctggccaacatagtgaaaccccgtgtctactaaaaatacaaaaattagccaggcatggtggcgcacacctgtagtcccagctactcaggaggctgaggcaggagaatcgcttgaacctaggaggcggagattgctgtgagctgagatcacgccactgcactccagcctgggcgacagagtgaaactctgtcttaaaaaaataaaaaatagaccatcctggctaacacggtgaaaccctgtctctactaaaaatacaaaaaattagcccggcgtggtggcgggtgcctgtagtcccagctactcgggaggctgaggcaggagaatggcgtgaacctggggggcggagcttgcagtgagccaagatcacactactgcactccagcctgggcgacagagcgacactacgtctcaaaaaataaaaaaaaaaaataaataaaaactaaaatatgtagtaatgctccccaactcccactgctgatttgagaagtaatgtgttgttaaaatttggaaaatacaaaaaggtataaagaaaaaaagaaaagtctcatgtagtcctgcagcttgagaaaagcactttttacattttgatatttttctttcccacctttccaagatgcattggtgaatacttttggaaatgtggttgggatatacacagttttagatcctgttgctttcactgaacattagatttgaaatttttccatgccattaaatattattttacaatatcatccttcagttactgcgtgaattttctgttatatagatttaccaagatttagttttttattggtttaaacagtgccgcggtgagcatcatgattattttcacaaaataaatttttttgttttgtttgagtcaggggtctcactctgttgcccaggctggagtgcagtggcatgatcatgacccactacagccttaaacccctgggctcaagtgatccacctgcctcagtttcccgagtagctaggaccataggcatgcgccaccacccctagttaatttttttgtagtttttgtagagatgggggtctttccatgttgcccaggcagatcttgaacttctggcctcaagtgatcctcccacctcaccctcccaaagtgctgggattacaggcataagccaccaccctggtccacaaaataaatttctagaagtgaaattggtttgctgattcattgcctaacctgagcactgtctctgttctcagggtacaagctttaaagtccctttctctgcttagagttccaatcccaagtgaattctcccatcactccgtgccatggcccttgcagcattgtgccataagccgctcccaggcagcaggaggtcgggaatgcttagggtccttgtcactgcatgtccagtattgcacggatcacactgtgccctggtacccttggtgactcctttcattgagagccgtctcaagatccttttgggggaattgcatagcccagaagttttctcttaggtgaataagcccttacaactctcattgcagtgggaagatgccagaagtggactatgtagttctgtcggaatggtttgactggatcttgaggaacatggacgtgtctgttgatttgataggtgagatgcacccctcccacctccctctcttgtctctctcctgggtcccttgaggatgtgcttggctgggccccaacccttgggggcagtgggtgaggcacttgcccttggcagttccttccccatgggagttcagctttctccctgagggcagacagaattcgggacttctggtctctcatggagaagaaccctggcctttgttctttaaacttccctccctggctcagctactttcagacccaaatccactgtgatctgatgggtttttctagtttgcaaaggaacaggaaggacagagcctgaacattcactgagacctgctgggtgtgaggcctgttttgagctctgtctatgaacagaatcccattcagcctcaaaacgaccccacggggccgctgacactgaaagagaatgaaagtcgaggcggagggtcagtggtcaagccaagagctggccctccctgcttcctgctcgagctgtgcagaccttcctcccgcctttgcctgtgtgcctgctttgcttccaagccatgagcagagtcctgagagccacgtattcttttaacctcagtttaccttcggaccaatcctgagacttgttaccagaggttaaagaagagatgcagggaagaggagaaggtcattccgctggtaagaggcctctttgacttggttaaagacaaactgggaaaccacctctgtccaacccggcttcctctcccggccccacccccatgagatcattgtgcccttgtttgcagagagagaacaggaaccaagtgtatcagagggtgaactctgacttcctgtttggccagagacccacgtggatgtccagatctgcttggcttcctgtggtcgctgactcacagtttggcaaccctcctgcttggaggcgttcccctcccctccccacctgcccctccccatcttggcagcaccagggcttgtctgttctgcctcctgaagattgcctggccttgtgctctctgtgtcctccctagaatgcgagttccaggagggcaggacccagccctcttgttcactgctgcatccctagtgcttagcacagtgcccggcacggaggcggtgctcatgcttagtggtgtttgcccactggagagatgccatgcccttctgagttctgctcaggccacactgactctcatggggactctgccagtataggcccgggctgtgcatctcgccctggcccttccctccttgcatctcccttcaaaatctggcctccaggctgccgcccggctgatatttccaatactcatcaccactcgtgcaatttcccagcccagaacctttcagtgccttgctgctggctagaatgcagtccccactttgtaatacggcttatgacccggccccaactgcctctctggcgttatcatcctccattccctactttctatgctctggctataaggaactagttgtggccacacacaaacaaccacatacacagtggagttatgcaaatgtgcctttgcacagtcgtttcctttgtctttaaagtgttactcagatgtcacctcctccaggaagccacccctgaccttccttccattgtaaccccccccaaacccaccccctggctttctgtgatcatgggccttaggacagcatactgacactatttgtttatacctttgttccccatccctcactaatgtgagctttttaagattgggtcttattccctccgtgtcctctgcatgtgccttggggcctggtgcctagtagttgctcagttagtattgaactgaatgtcccatgtgagaagctgccactggagggagacagaggctgggcaagcattcagtggggtgtcaggggctctgagctcaggataggctggactgggggccctgggaagcctatccaactcctgaaatcctgctcagccttgtttttccttggtgccagcacgatgcattcctgccacgagggcccaggcgtcactctgggcagctcctttgaaatcttggagacaagaatgctaggaagatggaatgtggtggaatggggccaggctggaccatgctgtgatgcgcacagcagctctgtgcagtgacccagatgctccccaagcctgggggccgtccaagccgtgatccaagccattgtcttaagggtttgaccaggtccatgggacacatctggctcctattgccaagggagagctgggcaggagatgtaaaggctgctgcagagttgacacgcgagcctctgggatggcgagtggaatctgtgtgaggagccatcccactctgtgcctgggagagcacgagtatctgctctgcctggcatgcaggccccatggctcaggagggcctgtgccccttttcccttgggctccgctgcatcaggctttctgcagttggtggtctttatagtctggagggtctataggttacgagttgttgagggggtagaagggcaatgggtgagggtcacagtcctcttggtggcaagacagagcggagggtttagaggctgcccagggctgggcccctgcctgaaggaactgaggccctgctgctgcaaaagtggcagtaaatgggagaagccaggtgtgggtcctgcctttttttttttttttagtatttattgatcattcttgggtgtttctcggagagggggatttggcagggtcataggacaatagtggagggaaggtcagcagataaacatgtgaacaaaggtctctggttttcctaggcagagggccctgccgccttccgcagtgtttgtgtccctgggtacttgagattagggaatggtgatgactcttaatgagtatgctaccttcaagcatctgtttaacaaagcacatcttgcatcgcccttaatccatttaacccttagtggacacagcacacgtttcagagagcacggggttgggggtaaggttatagactaacagcatcccaaggcagaagaatttttcttagtacagaacaaaatggagtctcctatgtctacttctttctacacagacacagtaacaatctgatctttcttttccccacatttcccccttttctattagacaaaaccgccatcgtcatcatggcccgttctcaatgagctattgggtacacctcccagacggggtggtggccgggcagaggggctcctcacttcccagactgagcggccgggcagaggggtcctcacatcctagacgatgggcggccaggcagagacactcctcacttcctagacggggtggcagccgggcagaggctgcaatctcggcactttgggaggccaaggcaggcggctgggaggtggaggttgtagcgagccgagatcacgccactgcactccagcctgggcaacattgagcactgagtgaaccagactccgtctgcaatcccggcacctcgggaggccgaggctggcggatcactcgcggttaggagctggagaccagcccggccaacacagcgaaaccccgtctccaccaaaaaatacgaaaaccagtcaggcatggcggtgcgcgcctgcaatcccaggcacttggcaggctgaggcaggagaatcaggcagggaggttgcagtgagtcgagttggcggcagtacagtccagcctcggctgggcatcagagggaaaccgtgcaaaggggagagggagagggggagggggagggggtcctgccttttgccttggctttgattcaggcgccaggggaagggccagtgtttgtgcccacgaacccccagtggagcagagcagggtggctggtgacacttgtgctgttttgctcagcctggccaccgagtgtgtggctgcgtctgccgctgtccacttgagccaggtttgctcttgcagggttcctttgtctgagtcactgcccatggtcattgactactttgaccccctctgcttgacacccttggtaggtggggtctgctctgtccactcccgacagactgcttgtgtttccctggcaggaatacctggaagcaattcaccatctccatgaggagtggctcatcaaaggcagccttttccccatggcagcccctgttctggtaagtaagactcccttacagggtacgagactgttctagaaagaggagtgacccggggaatgtcagccaccttgcagacaggggagggcacagtcctttagagtttgacaacttagaagaaggaaggtgggaaggctggtgctctctctcccagtgcctgtttctgggctgagtctcagagtgagttggccagacccgagggaaggcagtctgtgccagtgccatcacacctggcagttgtcactgatccagcatcttcagcgaagactctagacccgggtctcagttttcaccatttgggatagtagttcctctgatgtgaccttcctccttccgtggatgacacagagcctcatttcacctttgtttggtgactcaggtcatcagaaggaatgtcattgtctggtctgggctgtcacacagtgatgcccttaggaatgctgaggtgtgtggaactgtctgccctgcccactaatgtctctgcgttcctgtgtttactttttacagtaatcctcctttctcttgctgccatgtgtcatttctgactgatattgatgtgtctgtcccgtcagcatttccttacttccccatctccttgttttccagtttgctgtttccagatttctttactcagacaaataagcagtggcccagatgctcccaagaaatgcggagtctggggtccctccgagtcttgattggagggaacctaagatggttacatatacaacatgggattggctgtgaggcagggttgtgcgcaagctttggtgcatggctataggagcattgtttgatgggatgtgaggcagggctgtgcatgagcttttgtgcgtggccataggaatatctgtttgggctcaaacacttctgcttatggctcttgcaggcagtgaggttgccggaaagtgagatattactgtagtaattttttgtttgtttgtttttgagacagagcctcactctgttgcccagactggaatgcagtgacgcaatctcggctcgctgcaacctctgcctcctgggttcaaatgattctcttgcctcagcctcctgaatagctgggactacaggcgcatgccaccatgcctggataattttttatatttttcgtagagatgggattttgccacgttggccaagctggtctcaaactcctggcctcaagtgatctgcctgcctcggcctcccaaaattctgggatcacaggcgtgagccactgcacccggcctactgtagtagatttttaaataagtacagcttatttttctccctcattatggaaaaaaaggagggtagaaagtgatgagggaaaaaaacaaatcattcatgagcttacagggtctcactgtgttgcccaggctggtctcaaactcctgggctcgtgtaatcttcaggtctcagcctcccaaagtgcttggataatagacatgagccaccatacctagctcttgtagtacattcttaagtgaaaacctcattggaaatgtagattgccctagagctgaaagcgatttggctctaaccttcctttttatctgcctgcaaccttctgtgcccttccctgccccctgctgcctgcttccatctgtctgtctccagctgtgaaaggaggatgctgctgaggtcagtgcagccttgtgacccatgtgtctaatttccaggtgattgaggctgaccaccacatggagaggatgttagaactctttgaacaaaatcgggatcgaatattaactccagagaatcggaagcattgcccataggaggcaaaaggtctatggctcatgtctgaaaaatgcctgctgctgccaagttagctattgggagcaatctggaaaaacttgctcccaggagggctttgtgtctggccagcttgattttcctaatggtctcatctcctttgctagtgtctttgtcatgcgtctctggccctcgtgggtaaatgacaaacgggaccaatgggtttgccaagccctttgctgttcgcagcctcacattcccccggtgcctctcccatggctttgtgctgctgagtcgctctcatgaagcccttagggagagcacctgttgtgtgcctgacaccacgctggagctgtgtaccaatcgtctcagccttcattaggaggccgaggtaggagtcttatatcccaggtgaggaatttgaagctcagaaaggttgaggggctccccagaggtcacacagcctgtgtgcagtggagctggcaccattcagactttcagccgactcagcaactttcccttgccctgggctgcctcctcctgagagctgttccccaccgccctgcctcttccggttggaggctctcatgtctctttggggagagctggcagtgtgcggagctgataacattttcccaatattgagcagttcccaaggacagtcagcatttctagacttccacaaaattatgctgcatttggctggagcccggtgttcagtggtttccctgcccgaggtcgctgcagccccatctaccacatcttcatgtggacattgagattcacatgctggctcctgaagggtgctcagtctccttggtgattaaggtcctgcttgaactgctgccaactccatgtcagggaagtcgcttttggtgcctggctggtttgcccagagccaagctggggcaaggggcagccagccctggcttccaaggctcccgtactgtctgtgtccttgtataaggagctttgctcttggaattactgaaagtctgtggcccaagagagagacacaagtggccttaagtctttttgaagtgttatttcatccagggaaatgcctcgagccatagagcctgaaatcatctttgttggctcagaaaataccttagcttcactcagctggactgcattgaaggcgaggctgccccttggatcaagcagaaaacaagagaaagaaagaacgttccctttggggatagtctggaaagttgggatttgcaaataaaggctctggaagcattgctggtcctgaagctttggaggtgggcagagagagcttcaagaagactagatgcaaaccctggaaaggattaaggctcaactctggagaaacaggccacagcctctcagagcagctgttggctgtaaatagaggtagcaaggccgctcccaggcccctgtgagtgtgggcacctgtgcatgcaatgctccgactctgcagaggtgccaagtgcccctgctgggccagtcccagagagttaggaagtcaaggcctgcaactcctggttcttcctgtttggaccagttcttgtgccattggcaggatgagaggcagcagccaggcgggagctgtgtctagcagcacctgtagcccacgtgctgctaattagctggaaaactggcgaaggcagaacctttgctaccaggaatcttgacatgtggggtctgtctttgagaatttgtaaatgaacagtccaatatttcctctcggctcattttgcacatccatttttggggaaatgtgatttctctctctttttttttttttttttttgcctaaggcacaatctcaagaggtcctgagaccacgtacccatgatttttttcttgctctgtgatacccaataactccttcacctaagccctgttgttgattttgaagtgcttcctaggccagtgattttagcttctgccagctgcttttgccagtagattaacgtgtttttatttttcaaactccgtgtttcctaacgtggagtgtatgggtctaagagagcctgctgtcctccctgccttccaccttggagaggaggctggacgcatcagcagtggccagggcaggtcgcaaaatctcccagcctagagaccacacctgaaacggctgaagccagcttgcacaagggctgctgtccctctgcggcaggcagagctggtgggggcaggggtcacagagcagtcatagacaccatggaccagggcaggagaagggcagatggcacatgggcacaacagggccttgtccttagagcactggggggtcatggctgggaggggcatggcaggggctggcatccctgtagagccagaggggccacccagggcagtgacattccagatatgttgggctcacctcatccttgctgtgagactggagttccatggggacatgaagtcagtacaccgcagagctgctcagctgctctacctctcgctgacttttttgttgcacatatacattttctttcaattagcatttatttcagcttttatttaagctttttgacagtacatgtaaaatatatgattataaccatttaaaaataccttatgtacctggttttttttggaaactagatagaaatatatttatcttttacataaaagaagtgtgtagtggggtggtccagggctttgtggtggcttagtggccatcggggtcccaggctcttcccacctttctcttttgggtccacctcttggctcctggcttccttcctctggggcctgactgtccaggatggcagctggagctcctgctctgggcacggttggcatcagagcccactgctccccatccactctttaatccagatgctggtaatgtccctttccaaggcataactaagataagctggaaggttcttacgaggctttgctagaggccctgggaggtggggggaaaggcaagagggcagtgcccacccatagaccgggtcacatgacctggcatcagcgccgtggggtcctttgggcttcacctccctctcccctctgcccccacgtcatcccaccctcatcctcaccctcaccattcccatcccgtaccgtaatgtcccttgcaaggcctaactctgtgaggaatgaaaccacctcatccttgttccaataacatgagtgaccgaatttacaaacgagtgaatgtggacctctggaaacattacccagcttgtttttacttttcactttctctttctgcccctttcatttccgtaggagccctttacctagatgagaagtgtccccccgcctggggaatatatcagtcagaacaatcttcctgcagacatgcaccattagacccgagtgacggtggtgccatttaaacctcagagcaggtaaaaggtggtcctgaaacctgtctacccacagggtgctatggaatctgaatcacttcttttttcctagagccctggggtggggagctccctcaagtgttcacatgtgtgtggaatgaggaacacccatctccttggccctctccaccctgaagagttagttattaaaataattggcaagctcttgcaaatgtcagtcatccattgttcagaatggaatagcaataatacatccctggctgccctgggcttggccaggattactcactgaaggcctcagggttactggcacacactttcttttcctaataatcccatcccctcagctttcctaaggctagagtgaatttcgtgttcctttagtttacataagatggtgaacttggcaaaagctatcattaaacagaagctaagagaaagcctatgtcgtggaatccagaatgggtattgccattcactgctgtccacagaagctgtcttgaatttctttctgtgtcttttctttttttttctttaagactgttgtttaccagactgggctctgtggaacacaggtgtcctgggagatggttaatcattacaaaatattggtaacaatctaaagatgcatacataagagagtggtcaaataaaccattttccattcacatggtggagtactgtgcagctatacagaagaatgaggaagatctctctgaatggttatgaagtaatgtctaggacataaagttatgtgaaaaatgcaatgcccaaacgagtgtctatagtatgctaccctttatattagaaagaagagaggccaggcgtggtagctcacgcctgtaatcccagcactttgggaggtgggtggatcacctgaggtcaggagttcaagaccagcctgcaacatgggggaaccccatctctaccaaaaatacaaaaaagttagccaggcgtggtggtgggcacctgtaatcccaactatttgagaggctgaggcaagagaatcacttgaacccaggagttggaggctgcagtgagccgagactgcgccattgcactccagtctgggcagcaagaatgaaactccatctcgaaaaataaaaagaaaaccgatagaagaaaatacacagatgcaaaggaaatataggaaggacgcccagagacaaaataggttggtgggtaaaggctagaaagaagggaaggatgagactgggctacagggatgagaagggaatgacacttctttgaaatatctttttattttatttatttatttttttgagacagggtctcgccctgtcacccaggctggagtgcagtggtgtgatcttggctcactgcaagctccacctcccaggctcaagtgattctcgtgcctcagcctcctgagtagctgggattacaggtgtgtgccactacgcctggctaatagtagagacagggtttccccagtttggcctggctgctctcaagtgatatgcccaccttggtctcccaaagtactgggattagtgaaccgctgcacccagcctgaaatgtctttttctataactgactgttacatactgtgatgtagcaatgtttcacatacccttcacatactgccaaaataaataagagcaaccaggatgtagggaaaacagaaaacaaaattacagatgaactccaccataccgcaggtgagtaacataaccatactgaagggggcaggaaagaacagaactaacaaataactgtggaaaacagtatctttactggatatggtaagagtaaaggcaaaaatttctgtacataaaagttgtagtatagttattaaaaatgtttctcgaccatgcgtggtggctcacacctgtaatcccagcactttgggaggccaggatgggcggatcacctgaggtcaggagttagagaccagcctggccaacatggtgaaaccctgtctctactaaaaatacaaaaattagccgggcgtggtggtgcacgcctgtaatcccagctatgtcggaaggctgagaattgcttgaacccaggaggcagaggttgcaatgggcaaaaaaaaatgtttctcacaggagtataggttagtgattctgaaactatgtatactaaagttgaacaaacaagtaaatagattgtagactatgagggctggatttcttactgttagtgaaagaggttacaaatgataggggtctagaataaaccccgtggtgctgggttagaataggaggtgtcagtctaaactcatgattttaaaattttaggctctggtggctcactcttgtaatcccagcactttgggaggccaaggcaggtgaatagcttgagcccaggagttagagatcagcctgggcaatgtggcaaaaccccatctctacaaaaaatacaaaaattagccaggtgtgatggtgtgcgcctgtagtcccagctacttgggacgctgagatgtgagaatagatcgagtccaggggttcaaggctgaagagagctgtgattgtaccactgcactccagcctgggtaacaaaggaagaccctgtctctaaataaataataaataaaattatatatagatggatacagaaatatagatgtgtgtgtgtgtgtgtgtgtgtgtttatgtgtgcttagtatacatacttatgtttcctagctctgtcctgagtgtgtctagaggcaatggcacccagtaacagtgagcacacccggtacccagttcttggtctccaaacatcattctcctgcaaaaggaaccaggtctcctaggagatgtggttgattccagggatgccacaggggaatgacaggatgaccctggaatatcttgtggtgctagaaagaaagtgcagggatgtggggggatgatggagccatgtcaagggaattgaggagcttgcctgaagttcctaacggccaaagctggaacagtttgaggaacaaaataaattatgttagtattggattctaacacatagactaaaataaatatccacgaatccatgctgatataaacagttgaagaaataagtaaacagggaagaaagggagtgcttccttatggtagatttccagttaatacacacaaaaggcaagagggaaacagagacttgccattacataaacaccacagttaaaaaatcacaggccaggtgcggtggctcacgcctgtaatcccagcactttgggaggccgaggcaggcggatcacaaggtcaggagatcgaaaccatcctggctaacacggtgaaaccctgtctctactaaaaatacaaaaaattagctgggcatggtggcgggcgcctgtagtcccagctactctggaggctgaggcaggaaaatggcgtgaacacaggaggcggagcttgcagtcagccgagatcgtgccactgcactccagcctaggtgacagagggagactccgtctagggaaaaaaaaaaaaaaaaaaaaaataaatatatatatatatatatatatataaaatcacagacaagatttacctgttgatactaaaattagtggacagaagtttgaggaaaaacaagatttgcatagtttctatttcccctaatatacttatcaagtaaaaagggaaagaaattaactaatttgacagtggagatggaaaccccatagaaaccagcttaataagtgattaaggtaataagacgtagtgacatcatgaagcctttacaaagatgcactgaggacagcatcttttttttttttttttttttttttgagacagggtctcactctgtcacccaggctggaatgcagtggcgcaatcacagctcactgcagcctcgacctcctgggctcaggtgatcctcctcagcttcccggggagctgggactacaggtgtgtgccaccaggctggctaatttttttttttttttttttttttttttgagacggagtctcgctctgtcacccaggctggagtgcagtggcgggatctcggctcactgcaagctccgcctcccgggttcacgccattctcctgcctcagcctcccaagtagctgggactacaggcgcccgccactacgcccggctaatttttttgtatttttagtagagacggggtttcaccgttttagccgggatggtctcgatctcctgacctcgtgatccgcccgcctcggcctcccaaagtgctgggattacaggcgtgagccaccgcgcccggccattttttgtattttttgtagaatagggcttttgtcatgttgcccaggctggacttgaactcctgagctcaagtgatctgcctgccttggcctctgaaagtgctgggattacagtgtgagccatcatgcctggcagcatcatttgtttttttggtgtggtatccttgccagaaatgcatacttgactccagtattaagaaagcaccagacaaacccaaatggagggacattcaacaaaataactgattggaaaaaactctttaaaagcatcaagatcgtgttagacaaggaaaaaacaagaactattacagactggaggagacaaaggaaaatatacaaatgcaatgtgggatcctggatgggctcctggaatagagaaaggattttaatagaacactaggaaacttaaataatatgtgtagtatcgttaataacattgtatcaatattaatttcctgttcttgatcattatattatggttacataagatgtcaacttcagtgcaatgtgggatcctgtatatgctcctggaatagagaaaggatattaatggaacactggggaaacttaaataaggtttgtagtatagttaagaacattgtatcaatattaatttcctgttcttgatcattatactatggttacgtaagatgtcaactttaggagaagcagggccaggagtggaaaggagttctttgtactattttgcaacttttctctccatctaaaattagttagaataacgcccttcatgggaaataaaggcagagcacaacactgtaaatattacaatcccaaatgtttaatatatgcgtatatagaaaaaagactgggaggaattgcaggaatgtggtgacattgggtatcgctgaatggtggaaattatggtaaggtttgctttcgttttcatattcatctgtactttctaagttttctactcatttgatggtttaatatggtggatccttggaaataacggtgaatgagacaagatgaagtttatctctcatggagcttatcttctaatggggggaaatggaaaatgaatacatgaattaaaatctttgtgcagaaaattaagctgatgtgatagatggtcagagggggcctctctgagaaggtgacatttaaggggagatgtgaataacaaggaagagaacatggcagggtagggtagggagacagagcagagggaacagtctgtgcagaggctgggaatagggccaggctcagcatgttccagaaccttgcagaagccagggtggctctggctacagcggacaatggggaagggacctgagatgagttcagagggaaagtgaggggctgagcctgggacttgatatggcctcgggcacccctggagggaactgaacacatgagaatcatgatcaaatgtaggtggtttttttttgttttgttttgttttttttaacattttctattttattttattttttaaatatatagagacggggtctttctgtgttgcccaggctggtcccaaactcctggactcaagcagtcctcccacctcagctttccaaagtgctggaattacaggcatgagccaccacgcacagccctaatgtaggtttaacggaatcctccagcattcgggtggagcacaggctgcagaaggctggcagcctccagggacgtgagtgagagaggatggtgaatttggttactgtggaaggaggggggaaggggttggattcagactctgttgtgaaagagaggagctaggaattggatgaaggatgtgatagagagagagagcggggggaggaggaaagagagaggagagagagatatatgttggtcaagggtgatgtctgcattggattggagtgagtgagtggatggtggactcatttacccagatggggaatgcgggagcggcaggcttagtggagagagcaaaagttctgttttggtttggaataagcatgcttattatgttaatggtcagaaaagaatgaataaaaaaaaaataattagctcgcctttcctgcccctggaatccttggcctaagttgctctcccaggttcctttgctgcaggtcaggtgccctgggggatatgccttggagtggctgtcatggttccaagctgacgcaacctcttgcctcatcctcctgagattgctgacctgctctgcctccagatcagcctgttcttttttttttccatttatttattttaagagacagggtctcactctgtcacccaggctggagtgcagtggtgtaatcacggctcactgcagccttgagctcctgggctcaatcagtcctcccatctcagcctcctgagtagctgggactacatggctggctaattttaattttttttttaaattatactttaagttttagggtacatgtgcacaacgtgcaggttagttacatatgtatacatatgccatcttggtgtcctgcacccattaactcgtcatttaacattaggtatatctcccaatgctatccttcccccgtccccccaccccacaacaggccccagtgtgtgatgttcccgttcctgtgtccatgtgttctcattgttcagttcccacctatgagtgagaacatgtggtgtttggttttttgtccttgcgatagtttgctgagaatgatggtttccggcttcatccatgtccctacaaaggacatgaactcgtcattttttatggctgcatagtgttccatggtgtgtatgtgccacattttcttaatccagtctatcattgttggacatttggcttggttccaagtctttgctattgtgaataatgctgcaataaacatacatgtgcatgtgtctttatagcagcatgatttataatcctttgggtatatatccagtaatgggattgctgggtcaaatggtatttctagttctagatccctgaggaatcgccacactgactaccacagcggttgaacttgtttacagtcccaccaacagtgtaaaagtgttcctatttctccacatcctctccagcacctgttgtttcctgactttttaatgatcaccattctaactggtgtgagatggtatctcattgtggttttgatttgcatctctctgatggccagtgatgatgagcatttttttcatgtgtcttttggctgcataaatgtcttctttcgagaagtgtctattatatcctttgcccactttttgatggggttgtttgttttttttcttgtaaatttgtttgagttcattgtagattctggatattagccctttgtcagataagtagattgcaaaaattttctcccattctgtaggttgtctgttcactctgatggtagtttcttttgctgtgcagaagctctttagtttaatgagatcccgtttgtcaattttggctttggttgccattgcttttggtgttttagacatgaagtccttgcccatgcctatgtcctgaatggtattgcctaggttttcttctagtgtttttatggttttaggtctaacatttaagtctttaatccatcttgaattaatttttgtataaggtgtaaggaagggatccagtttcagctttctacatatggctagccagttttcccagcaccatttattaaatagggaatcctttccccatttcctgtttttatcaggtttgtcaaagatcagatggttatagatatgcggcaatatttctgagggctctgctctgttccgttggtctatatctctgttttggtaccagtaccatgctg

SEQ ID NO: 203 - DNA, 1960 bp, Homo sapiens
gccaagttatgggtgcgttctgccagcgtcctagcagtgataaagaacaggaaaaagagaaaaaatcagtgatctgtgtcgagggcaatattgcaggtgggaagacgacatgcctggaattcttctccaacgcgacagacgtcgaggtgttaacggagcctgtgtccaagtggagaaatgtccgtggccacaatcctctgggcctgatgtaccacgatgcctctcgctggggtcttacgctacagacttatgtgcagctcaccatgctggacaggcatactcgtcctcaggtgtcatctgtacggttgatggagaggtcgattcacagcgcaagatacatttttgtagaaaacctgtatagaagtgggaagatgccagaagtggactatgtagttctgtcggaatggtttgactggatcttgaggaacatggacgtgtctgttgatttgatagtttaccttcggaccaatcctgagacttgttaccagaggttaaagaagagatgcagggaagaggagaaggtcattccgctggaatacctggaagcaattcaccatctccatgaggagtggctcatcaaaggcagccttttccccatggcagcccctgttctggtgattgaggctgaccaccacatggagaggatgttagaactctttgaacaaaatcgggatcgaatattaactccagagaatcggaagcattgcccataggaggcaaaaggtctatggctcatgtctgaaaaatgcctgctgctgccaagttagctattgggagcaatctggaaaaacttgctcccaggagggctttgtgtctggccagcttgattttcctaatggtctcatctcctttgctagtgtctttgtcatgcgtctctggccctcgtgggtaaatgacaaacgggaccaatgggtttgccaagccctttgctgttcgcagccctcacattcccccggtgcctctcccatggctttgtgctgctgagtcgctctcatgaagcccttaggggagagcacctgttgtgtgcctgacaccacgctggagctgtgtaccaatcgtctcagccttcattaggaggccgaggtaggagtcttatatcccaggtgaggaatttgaagctcagaaaggttgaggggctccccagaggtcacacagcctgtgtgcagtggagctggcaccattcagactttcagccgactcagcaactttcccttgccctgggctgcctcctcctgagagctgttccccaccgccctgcctcttccggttggaggctctcatgtctctttggggagagctggcagtgtgcggagctgataacattttcccaatattgagcagttcccaaggacagtcagcatttctagacttccacaaaattatgctgcatttggctggagcccggtgttcagtggtttccctgcccgaggtcgctgcagccccatctaccacatcttcatgtggacattgagattcacatgctggctcctgaagggtgctcagtctccttggtgattaaggtcctgcttgaactgctgccaactccatgtcagggaagtcgcttttggtgcctggctggtttgcccagagccaagctggggcaaggggcagccagccctggcttccaaggctcccgtactgtctgtgtccttgtataaggagctttgctcttggaattactgaaagtctgtggccctaagagagagacacaagtggccttaagtctttttgaagtgttatttcatccagggaaatgcctcgagccatagagcctgaaatcatctttgttggctcagaaaataccttagcttcactcagctggactgcattgaaggcgaggctgccccttggatcaagcagaaaacaagagaaagaaagaacgttccctttggggatagtctggaaagttgggatttgcaaataaaggctctggaagcattaaaaaaaaaaaaaaaaaaaa

SEQ ID NO: 204 - DNA, 705 bp, Homo sapiens
atgggtgcgttctgccagcgtcctagcagtgataaagaacaggaaaaagagaaaaaatcagtgatctgtgtcgagggcaatattgcaggtgggaagacgacatgcctggaattcttctccaacgcgacagacgtcgaggtgttaacggagcctgtgtccaagtggagaaatgtccgtggccacaatcctctgggcctgatgtaccacgatgcctctcgctggggtcttacgctacagacttatgtgcagctcaccatgctggacaggcatactcgtcctcaggtgtcatctgtacggttgatggagaggtcgattcacagcgcaagatacatttttgtagaaaacctgtatagaagtgggaagatgccagaagtggactatgtagttctgtcggaatggtttgactggatcttgaggaacatggacgtgtctgttgatttgatagtttaccttcggaccaatcctgagacttgttaccagaggttaaagaagagatgcagggaagaggagaaggtcattccgctggaatacctggaagcaattcaccatctccatgaggagtggctcatcaaaggcagccttttccccatggcagcccctgttctggtgattgaggctgaccaccacatggagaggatgttagaactctttgaacaaaatcgggatcgaatattaactccagagaatcggaagcattgcccatag

SEQ ID NO: 205 - DNA, 22153 bp, Mus musculus
  misc_feature (6130)..(6149): "n" at positions 6130 to 6149 can be any base
ttgcagatctagacattgacatctggtcttctcaaagctaagggcaggcatgctctggccttgaactccatgctcagccctagtccttcctttcttcttcttcttctgttaaatggggtttgatttctttgtctgataaatgaggctgggagggagggagagatgatgactcagcagttcagagctcttactctttcagaggacccaggtttgattccagcacccacctggtggttcacaattgcccacaattccagggtgcacatgatacagacaaaattcaagcaaaatagtcacacacacacataaaatacactaaataaatcttttctgaaaagactaaaagggaattgtgattgctggtctcttgggctacagccaggagctgcatgtttattctgtattcttctagtttgttgctctatttgcccactatttttttagttaccaggaaaaatgtatgatagctatattttgctgaaatatgtataacgcataggcacttgttcttaaatttcatgcaaatagtattacctggttggttggttgatttgagaaagccttgataatcatgtagcccactctggcctggaacttgctatgtagctgttgtgtctgtcattgtcccagccaagcaactgcagtcttgaggagttcaactgtacccccttgcaagaaaaaaaaaagtatcctaagctgggctttcttgactctgtacacctcctcatgaaggagtgaggaggcttgtgagaccctcacctgttcctccaggtaataaaaccccagtccctgttgtttgcaagtctgccttaattgcacatgacctgggaggaggctagagtatataggccaggggagcacagaggaaggggagcccatccttgtgggatgggtaggagaaggagcatctatgcccaggtaggtaacaccccttacctctctgctctggaaggaagcccaagaaatgcattgtttccctagggtgagctttggcagaaccacgccttcctttgatgggggaccttaaaagaagaagtagactttgtgtttatgtctccagggaaggaattttaaccaaagtagctgggataagcttgaactcaggtgtgaactaccacacccagtttatgaagttctggagatagaaccaagagcttcaggtatgcggggcaggagctcagccaagtaaactgcatccacagccctcgcctctttacttgctgtgagaaactctgcacgtagaacagagtatcagggaggtttgtacaattcgggatctcaccaggatcccctaagcacgtgttaacagcagcatccagtctcagaaccaagagaaattaattcccagtgcagccctgggtttaagggttttatggaccaggcacaagctgtaattactgggctgtgctaggtattcctggcaaccacctggaaagttataaaggtgtaatgagtgataaatagcaatctccctccccccaaacaaaacaaaatcccagaatggactacctggaggccacaggatgtggaaacttaactcttcatttcccaatgagtcacttttgaattcctactgatctgagtggagtttaaaatttttccacaaatccttttctcaggtttctattctttcacccagcacctactcctctctcccttcccctagtgtttacatttcctttcttttattcctgcaagttcccagccagaaacccttacccttactccatcatcacagagtctcctaggatcttggaggtcctctgtgaggtctgcctcttcagagcagaacatctaaaagttggacacacaatcctgaggcaccttgtcagagtttgtgtgttttgggttgtcatttgctgagctgggtgttcaagacatggagattaagcaaattgcctgccctagtgaataacaatactatcttcaaggcgctgtgctaataagctcccctcaccccccagttttttcttcttaagacggagtcttagctgggtgtaacggcctgtaatcctagcacagaggcggtagcagaatcaggagtcctagatcggcctacgatacatagtaacccgagtcttaaaagaaaagaaagcatgctgagtatggtggtgtatacctttagtcccagcaccccagcactatggaagtagaaacagtcagatctctgtgagtttgaggccagcctgatctatatagtgggtttcaagatagtaagggatatgtagagagaacttgtttcatatacatacccacaagcaaagccaggctaggtggtgactgccttaaatgccccagcactcagtgttagctcaggcttaatgagatgatgtgaaaataaaaagggagagaaggatgaggaatgggagcttcccttgccaaggagacgcagatctgttccctgcagtctcatggtaaataaaactgaggtttggtttggcttttcgagacagggtttctctgtgtagccctggctgtcctggaactcactttgtagaccaggctgtcctcaaactcagaaatctgcctgcctctgcctcccgagtgctgggattaaaggcgtgcgccaccacgcccggcacaactaagcttaagagaggtggacttccttgtcaggcagctgtactcatcagaagctcaggccagagttgctcagatcacctgaggctctttgtttcatggactcctcactccaggaagcagaggatctctgtgactttaaagcaggtgtgagacaaaccaggagctatattgttatacattgttattaagtctccattccttacaagaataagtttctctttcctaaacctaaagtatcctgcaaactgttttcaatctaccctgaaccgggcccactcttttgtcttgataaacccctgagcctgtgataagtgatcacccttttgctttatgaaagtgtgtcttcccaggtacctgatggctcccctttgacataatgtgttcttgctcttatttttattgcctcctttctagcagccagtaaccacagctgtttcctattacacttatctaccccaaggcagccttgagccctgagtgcccccattctctgtccagtgctaacagccattatctttaccgctgtcttttcttttccttttcttttgttgccccccccccattttgttttgctggccttaaattcagagacctgcctgtctctgcctctcattataggcatgagccaccactgcccagcatggacagctgtgtctatcaaccctaacccattcctcataaaagggttcccaaaagccagtgaggggctgttctctgaaaccccaacttagggtaaggcagccatctggccagtcccttgtgcacttctcaataaagctctcttaatcagacagttgtggaaatggtttttttctcagatctaacaccagttggttctacacagtgaattccgtgccagccagggctacaaagtgagactttgtctcaaagcaaaagaaagagaaagaaaaaataatgtggagaggaggagacaagatcttgctgtgtgttctaggccagcctcaaacttgtgatccccttcttcagccttccaaacagctgagatcacaggcatgcaccacagcaccaaactaagagttctgccccttggaagttagagggagggagtatatatgcatgtgcatatgcatgtgtatgttcaagagcgccttgggggcagagggttggggaagaggcacacaagtatttcacagagctcgtatataggttagaagacaatctatgggaattggttttctccttctgccacgtgggtcttggtaactgacctcagatcctcagggctgacagcaagtgttttgatgtgatgagccatctcatgagccccaagaattatccttttaaagctcccagagaccccactgaaatctacgaatggggaaacaaagacacagagaggttaaataacttgtttgatgacacacagccaacaaaggatggaactaaaaccttggctccaggcagccagattccagaaccttctcctttaaccactgtctaatcaataatagtttgattctaataaagacaaatttctaaaaagtgaaaaagatactttattttgtttgttttcctctgtgtagccctggctgtcctggaactggttttgtagagcaggctgggcttgaactttgagatctacctgcctctgcctccagaatgctggggttactggcgtatatcatgcctggtaagataccttgttaatgctaagtggatgctgtgcagatagtaaactagagcaaggtggcgcaggactacagctgctggtgtgtgtggaggttttgtgtttggcctgggtttgtctgttatttgtttttgataagggttcattatgtggcccaggctggtcttaaacttgagatcctcccgcttcaacctcctgagtgcttgggctacaggcatgtgttaccatggttggcatatatgtggtactttgaacaggggtgtgtactgctacattgagcatctatctccctacgtcatagagctttcaaaaggtatatgatgttctctgcaggctctgtacaaggcctggtccagggaagactcaaatgcctgggaaggaagggagtgcagagggagaggcctggcaggtgactcagtgcaaacccttgtcagtgtttgcccagctggggtctgtgtgtagatcatgggtcctgtgactttgaaacagatacccctggagcctctttgaggaataaggaaataacatgatgtcacatgttggctctgggctaagccctgtcacacacatagaggtgttctcattgtcctggaattacacaggaacaaactgaaacttggaagttgacagcatggtgtgccatgatgaagcagggagttctgtgtgcctttaggaaggaaaataaaggtaggacagttgtgtgtccatgtgtcccacatcctgactgtcctgctgtcttcctggacattcaggacactagtaagcttttttacagtctgttttcctataacctgatgtcaatctatttcaaatgagaggaaatattttctgtcatgatgataaaggacaggtaacaaggacatcattttcggtacctttgtcttgatacgttagccctgggttttgtttctttgcttattttaactttttttttttaaatattgatttgaggtcagggtctccctgggtaacccaggctggccttgttaatcttagtatcacattaaagaacttcacaaatcagacataatccagcaaagcaatttctttttatagagtcgtgacccaaaccaggctagcaagcacaccggagcaggaagttcacttaattgttattctaacgcaagtattgactgagtcacctctcattggtgcagcttggcctcataatctgaaaagactggctaatttataatcacacacaaaggaattgaaagaacagagggctgtgtgtcatcacattctgggacttagtgaggttttgtataataagagtttcagttgggcattttacattgtggggagatttatggcacactggctcttggtgggctaaccacattaggtggaaaaaaaaagattctcggagccttggctttgagatcttgtggtggtgggatttcaagccggcaccaccacacccagagctttgtttcaaggtttcttcccttgtgtttatttccaccttgggattagacccagagcctcaaacctgctactctctactctctgtccctagccttcttctaactttctgccttgggacagagtctcaccaggtttcccaggctagacttcaactcattttgtagcccagtcaggctttaagtttgccttgtttcctcagtaactgagatctctcattctcaacaccagagtcaggctccataatgttatcctctctggagtctcctcataaggtttccaattagcccagtactgctctgattcaagcaacttgctggttttactctcatatcctaggtttacattttgatttaccctatctgtctgtctgtctgtctgcctacttaccatatgtttgtgtgggactgtgatgtaagcactgcctctgtgggcatctgtgtgtttgtacacatgtgtgtgtgtgtgtgtgtnnnnnnnnnnnnnnnnnnnnacacgtgtgcacctgtgtgtatgctcgtgtgtatacctgtatgtgtgtgtgcctgagtgtgtacacctgtgtgtgtgcatgcctctgtgtgtgtgcctctgtatgtgtgtgtatgtcattagtattctgtctaagctccaccccacagttacctggcaacagccaggtaggcctgactcactataaaaggggctgcttgccccctcctccttctcttgctcttcccttcttgctcctgctgtctttcctccctacccctccagtcccttctcccctctctttccatgtgctcatggccagcctctactcctgttctcctctacttctctctctctacctttctctgcctctactaccctcttaaccccacccccaccccatgccctgaataaactctattctatactataccatcctgtggctggttcctcagggggaagtgccttagcatgagcccacggaggcaccacttcccccatacctcaccacacctccatagaacatatctcccttttctttattttttgtttttgtttttataaacatatcacacgtggtagcaggaggatgctttattccctgaaacagggtctgtcactgaacttggagctaggcagcagctaataagcagtccttctgtctgcttcactagtgtcacagtgctgggggcagaggtgtgcacatggccgtgcctggcttttaacctgagtgctgggatcttagcgcgggccttcttgtgcagcagtgctctcacccacaggccatctctccaggccctgggccggagctttaaagcagcgctgacacaagaatctggaaaacagatgcttggttttgtttatgttcaggggagaaagccgcaaacagaaacacagcctcttcttaaccagggcaaccagggcctgcagcaggcctggggtcacatccgagccttgtgctgacacggagggaggttcacagcctgtggacgtgggcagaggacttgatgtctggccagggttgagagggtttggtttttctggaatccagttttgttttgtttttagatgtggaatgttttgtctaactccctgcctggagacagcaatgcagatagaattggtgtgggcaccctttctgggctaacatgactcacagggttcatatccttccatcaagagtaggaaattcccctttcctccgagctcagcagctctgtggaagaggaggtggaaagattgtaagagccggggagtgtggataccacgaaggaaacagtgtcttccagacacaacaggactgattgatacacatatgaactcaacacgctggcagcctgcctgcgcctgcccaggttcaagccacatggggtcacagcactgagaggggaaagtggacatggactcccacccctaaccaaattgacacctgcttacaaaggaaaacttagtttcctccaatagagtctcactggctgcattaaccccaggtaagggtcagccccatggccagcaggagatgccaacacaacagtacttttatcggctttcttttctcacggtgttttcatcagacatgttttggtcttattggtcctttgtttacatattatagtttctgattttgtgtttttatggatttgtgtgtgtgtgtgttttgttaggactcaacccctggacaaatggctaactgaagtgcctattaacatatcagggcagatgctgtcagcctgcctctctcagcattgccagcacctattacggagctgtcctggctggtataccccacatgctaccctaaactctcccttcccacagtttctctgattcctaaataagatgactatgctagtatctttgcctttttattacctcttggtctctgggttctcaggtttttttgtttttttgtttgtttgttttttgcctcttggccacttggtccaaggttcctctgtcgaccctcctctcttctcttccccctgtctctttctctctctgtctcccacaggccctgttaagtctgctggccatgttcactctggactcttgcagatagctctgcttgtgctctccctcatgtctacactaaaccttctccaccatacccaggagccgcatggcctctgctttttaattttttcattcatatttctgacgacgacgacggtgacaatgatgattcacctgttcgtttcctatagagtaaaatttgggggcatggggagggtctgggaggagttggagaaaagaaaccttgatcagaatacattgtatgaaaactttttttaaaataaaaaaaaagtagaaaatttcatttcacatgctttttatttgaacttaaaattcatactaattcttatcaaacaacccaagggaagctagtatggactgaaaaagcttactattagttcacacttgattcatactggctgggtgtggtgatgcacacctttaaacctggcactcaggagtcaaaggcaggttgatctctgagttcaacactagactcaaatctggcctacagagcaagttcttagccagccacagctaaaacagtgagactgcctaaaaaacaaggcagggggtatcaaagcacaaatacctgtttatttcattctgccctcaatatattatttaaattttagaagtcacacgtatttattgtgtgtgtacatggataggaatgtgagggtcagaggacaatttatgggacatttttctctcccatactgtatgggtcctggaaaccgataaactcaggttgtcaggcttggtggcaagtactttacccattgagtcatcttgccaacccacaatattttattttaaattccttttctccactcttttttttttttgaggggggagggtcaaggcaagggcactgtatgggaacccatgggaagttgtgactaatccttacactgttcccgcttgtgaaggttttccaggcctcatgagtctgcaacctctcaccaacagagccagatagagttatcctctgttaaagggggaacctgaagcaatcagagagggaaagtgacgtgtccaaggtcacacagcaggaaacactggatctgagctgacttgtgatcccagcatttaggatgaggaggccagagaattgcaagttcaagggctaacctgggctccatagaaggattctgtcagaaagaagggtagagggaggtggatcaggaatcagagtgtggaatccagggtatttgctgtctctatcagctagctatcctccatcttgcatgaggaagaagtccctggggactctgttgaaggggacttttcacaaaaatagaagccttgggtgtgacaggaactgctgaccaagcaagaagtgggtcagtgtccctcctccctcccttttcagtatgtatgctgccactacctcctgaatctgaaccagactacagtgtgtgtgtgtgtgtgtgtgtgtgtgtgtgtgtgtgtgtctgtctgtctgtctgtctgtctgtctaactatgacccaggcccaggaggggcttgtggcagaggctgaaatgataggaaggactggcctatctgaggccctctgctctccctggccaatatcccaaagactgtgcccagatcctgtctgcttcctccgcccctgaggcgagagctttccacgtggaaaaacacagctgtgcttgggtgagtcctgtgagggaggagggaggggagggtgctcctctctgctcaggactgctgtctatgggcccagttctgggaaagggccagattgcatcagacagggcttggagggcgggggccaaccccgtggtttagggaggagacagcgttataagtagggtgagaaactgggagagggcagacattcagacaaggagacacaggcaagactttggagagagcagactaggcataatggccaccttgccaccaacagccaacccttcccagcaacctctaaacctagaggatgaagatggaatcctggatgaatatgatcagtacagcctggcccatccctgtgtcggtaaggttttcgtggtagctccttggtcagcccatctgcttctcactgggtaccccggtttacctttcctagctaatctattcccaactcccaagtaaccccttctagtctcatctactgagttctgtctcccttagccccaagaactcacaagtgagcatctctcattctatacttgagtaaacagcaaggatagagtgcttcagacgtgaagacgtgaccgccccactctggccatttatatgcctgtcctaacctcacacacctcctctacctcctgctccaccagtcgggggaggtcggaaaggtcggaccaagagagaagctgctgccaataccaaccgccctagccctggcgggcatgagaggaagctgctgaccaagttccagaactctgaaaggaaaaaagcctggcgctgagacggagctggaggtgagtcgggagagccgggcctaagtgtgcagagcgggaagcggggaaccaagagctggtcctggtgagatggcgctgcaggtagaggcacttgcaggcaagcaggacaacctgtgcttgatctctgggacacgtgggatgaaaccacgtgatgaaaggggagagaaccaattgcaagctgtgttcccgagggagccctgcagatagatgtccaggcagggaagtgataagaatgaaaaccccattcagactgacttccatcagcttggatcagatttcagggcatctaacgccaggcggttcactgtcagcatatttaaaacacagtacaatttgggaagaggtttctaggcaacagtcagtccatcagttcagttccaggagcacaataaagcttgaggtcatcaggcagatgtgacatctttcctaagagtgggtaatggtctagggaggggagagtctgggattatcattctggagaacttgagtgaggtcggcttctatagcaaaagctgggggaggtctgactccacacagagccaaaagctcaccgggttgttaacaaaatccactctcagatttctgagtggaatgcaggtatttgactttatctcctgcattgtggagacacacggcatgattaaaacttctggttcttagtgcttctcttgagtacaaggacttctgtacctccaatgtccaccgacttccatatgctcaaagtagcacatgagaatacgcatgtgcacacatgcatgcaaacacattggcatatcaataaatgaaaaaaataatgttggccggacagtggtggcgcacgcctttaatcccagcacttggtaggcagaggcaggtggatttctgagttcaaggacagcctggtctaaggagtgagttccaggacagccagggctatacagagaaacctgtctcgaaaaaacaaaatacaaaaaacaaaaaccaaaaccaaaacaaaacaaaacaatagtgttgtgacactatttttattctacatctaaaataatatgagacccgtatttgactgagctccctggtaaccagaggtggggggagttcccatggagcctttccaatggagaggaagtttggtttatggaaagggaaactgaggcagatagagtcaagtacttctctaaggtaatagcaaatatgagtaggaaaggtggaagtcaaactctgatctctgtccctttcgttgcctgctttccctctgcacagataaggccagaccacagacaccacacccagcaatggatacaggacatcacacccagcaatggatacaggacatcacacccagcaatggatacaggaccttggagaaattaggagttgtaagcaggacctaggcctgcttgattctttcccacctaagtgaggttctggagagggagcccttccacccttccagacccagcaaaagggcaagatgggagcaagaagcagagggtagacgggcagagctaggaaggcagcccccaaaagaactgtgggggaaataaatcggatgcccttgggtggcagcaacaataaatcgtacagcagtgacagctttggcatgtgttgtgtgtctttgttgtgtttgggtgtgttgtgtctggctgtgtccattgtgtgtctctctaggaggctgatctggaatgggagcgtccttattgcgtagcatatgggcttgaacggttctccgtgattgttgccttcttctaatgtatgcagatgctttgaggagcctgtttctatggtttcttccagggaagttgctttgtttctttgcagtgctgtcccagagacaacctgtggccagtcccctacatattcttgagcaccacaaggtcctattatatagagctgcttttggaagagaatgtttctattaataccatttgcaaaatggaaaaaaaaaacagcatccatgatttaaaacatgcagaggatttgttttaagcaaccgagggctcaaattcagtcatgaaataccaggctggcttccaggatggggtgcttggtgagctggtgagaaagctctccctaagcatggtgggccgatgggtctcaggaccagaattccaggcaaatgtgaagcaaatgagaagatggttgaaccaagtgtagagtggcctgaggtctgagtttggaatgttgcaattttactcagacgaaacaatgttctttctcacacacaagttctatgagtaaatactcctaagtaacacaggtggcaagtccattttcttgaggctggtctcaaactcctgaactcaagtggccctctaagcctcaaattctaggcacccgtatcaccactcccacttagcctattcgttcttaaaaagaattatttattcattttctgtatatgagtacctggtagctgtcttcagacacaccagaagagggcatcagatcccattacagatgattgtgagccaccatgtagttgctgggagttgaactcaggacctctgaaaagcagtcaatgctcttaactgctgagccatctctccagctcaaccctatttatttttaaggataccatttgatagtagaacgcatagcacctgctcacagtttagtcacatgcttgaagagagaggccggggaatgccattcttagctgccagccatttgctaacccaagctgaggtgagggcagagttttattagaggaagaagatggagcatactggaagaaataagcagaaacattactcaacactcagactcagccaaagtgggaggaaagagcccttgctcttgctctgggctgagcctttgtcccttctcactaacccagcttgtagagcctggagcccattgcacttagatggaaccggaagctagggtacttacggaatcagtggcctcacagcaggctgtgggtcagctgcaactctcagggacatatccagccacctcctgtgcagctgggaacattaggacaatttctggtctggctgggcatggtagctcacatccgtagtcccagcattcggaagacagaggcaggcagagtttatgagtttgaagccagcctagtttatgtagttccaggccagccaggactcatagcgacaccctatactagagaagggggttgggggcggagggagggagtgaaagctgcttctggtcctatctcagtactccaggccaaccaggactcaaagtgacacccaataaatcaagcaaccaagcaagcttttggtcctatctcagtgctctcaggaatgtccggtttccttagtgccaagaagaacaagaagaataggactggcttccttgaaggctgtccaattctacctcagggcaactgctttctgtggactaccagccaaccacctgctctggaaggttctgcttctctgttcaggatgcccgtgacgccacccaacctgcaaggctgagtcaaaggccttgtcttcagcattcctctgctgggccctctcccctccttctgttgatctctcctctggaatgccacaccagctaacaggctcacggatatttcttttggcaggtggttttgtggaaattgtcctggtggcaatggagtgggccttttatttttaaataggatctcactctgtagccttgtctgtgcaggaattctgtagacaagtcaggccttgaactcatagagatctgcctgcctctgcctctcttgaatgctgatattaaaagtgtgagccaccctacctagcccaaatcattcattgctttgacatctgttagttgcttgttattttaccagggcagggccgaagcacagactttgtagagagggacacatggtacagcttttagctttagaacctaaaatagcaccacctctgggcagcatgcttgcagcagtatgcatctgggtgtccagcttcagaaatgacagcgcccatattttgggtgcctgccctaggacagacaggtttgttcatttgtttgtagcgtttgttttctgcggggcatcaaacacagggttacatgctaagatgacagtctgaccgtggcatctgtacctgccctgcaataggattttacagttatgtctccatttaatctttatagtaacccaataggacacactactagtgttcctgtttttccaaacagaaatctaaggcccagagatttgcaagttcatactagaccacatatagtaagttacattgtatttcatggctcatttagagacacgcagactcaatcaataccacatgagactctgagctcaggttttccaacctctgaccttttcccctttgatggtgtgcccaagaaacacggggttctgggcaatgagcaaccctagattgtagatcttctaagggtgggttcgaaaacaaccttccttccgtcagagagaaaattaaggtcaagaacacccgtcctcagtgtcaatggccagtcctagctgctggacccttgagcacctgcttcttaggagatgaacacgccaccacttactcttgacctctgattgacagccctctgcctcacctgtctctggcacagcctctgtgccaggaactgttacagcaattcttagaaccttggagatctcagatcaggaaggaccctgagcagaatgtccctcttttccaccccgttttcatctcgtgcatataatgtctgattctctcagtttcggggattccttagtagaactagagaaatcactgacagaatctttcccttcagggccttccagaaacttctcagatttccgtagctgaaaggattcccagcctcttgcagagaattgagaaactcactatttttttttaactcttgtggttcctttctcaaaaattcaaggcttgactggccatatatatgtgtgcctgtgtgtatgtgtgtacatatatatgtatatgcatgcattcatataaatttcaggatgactcaaagttaattttcaactaataccccttaaagataatgctagtgacagtcatagccgtagcaactgctatgctgggtgccatggggattccccaacgtcatctctcacacagcgttccttccaggtctgtcccctgaggctcacgtgctatattgtatctacttgtcattgaaaaaccacccctttacctgttttactcaagcgcatttaaaaaggaaactatgtaaccaccctaactaggaagccatgtgctgctcataagcacaagttcactctggccaagtccagtgcttgccactgtaagcctgactttagggggatggaggcagggggattgcaatctcaaaacacaagacaaacaaaacttatatacaaatttaacttcttttaaaagttcatcgaagccagccaggatggctcatgactttaatcccaagcactcaggaggcagaggcaggctgatttttgtgagttcaagggcaccctggtctacatagagagttccaggccagtcaggactatatagtgagatcctgtctaaaaacaaacaaacaaacaaatacaaaaaccaagaacaaaaagtttatgtgcctttctacaatgaccaagagtcacaattgtgcacactaggaagacacagtgcaatgtggtaccagaacaagaaaaagtatacttggtgtgaccatggatggatgtcctccaacttacaatagttcaacttgttcattttgaggcaaggtctcactcactacatagccctagctggcatcctcctgcccctggctccagaatgctggaattaatgacacgtcaggcctctgttacgttacagtggtgtaaaagtcattcacactcaacagaaagtatactcttgtttctgtttttgttcttgtttctgtttttgagacagggtttctttgtgtatccctggctgtcctggaactcactttgtagaccaggctggcctcgaacttggaaatccacttgcctctgcctcccaagtgctggattaaaggcatgcaacaccactgcccggcgtgaagacagtctcttggtacccaggctgtgaacttgatattttgttgagcatgaccttgaacttctttaagtatcattgttgaggggaggcctagatgtgtgtgtgtgacatcagaggacaactttgtgggatcagttctttcattatacttttacaagtgttctagaattaactagggttaaaactgcctggcacgtgccttttatccactgagttgtcttgctgctccaaactttgggcttctgaactttttgcctccatcatctgagtgctggcattataagtgaacaggactggcccagaatgagaacacactcttaatcctagcacgtgggaggcagaggcaggtgggtctccgtgagttcaaggccagcctgaactacagagtgagtttgaggacaactggggctatatagaaagattctgtctctcccacccaccccaaaaaggcacacaccactgctcctcattttattaggcgatgagatcaaacccagggcttcatgcacacgaagcaagcactctatcaactgagccatagcctccaagtcagcatttaaactttttttttttttttttggtttttcgagacagggtttctctgtgtagccctggctgtcctggaactcactctgtagaccaggctggccttgaactcagaaatctgcctgcctctgcctcccgagtgctgggattaaaggcgtgtgccaccacgcctggcagcattttaactttttaaaaattacacttataatatattgtgtgtatggtacatgtgtgacaatcaggacaacattcagaagtcacttcttgccttccacaatgtaggtcctgggggattgaacttgggcttggcggcaagcacctttacttgctgagccattttgctacctctccctagtttttttttttttttagatttatttatttattattataaataggtatactgtagctgtcttcagatgcaccagaagagggcatcagatcttattacgggtggttgtgattgctgggatttgaactcaggacctccggaagagcagtcagtgctcttacccagccagatttctttctttcttctcggtttaaactttgcctgtgtggcagtgcacacgagtgcaggtgccgagttgctccccactggagctggagtttaaaagtggccacgaactgcctgatgtgggtgctggagtcttctgcaacccaagctggagtcttctgcaacccaagctggagtcttctgcaacagtaatatgtgctctcaaccactgagcacagttccctcagtccctcagccagcttgtgcagcctggactcacctactgagggatgcactcacagagagctgcccccccccacatcaatcagcaatcaagaaaacaatccacagacacatccacaggccagtctgatccagacacttcctcggctgatgttcgctcttcccaggtttgtgtcaagttgaaaatagaactaaccagagcacaggttttacagtgtagcccaggttggccaggaattcatggttcccctgcttcaagcttcccatgctaaggttgcaggtgtgtgatgacacccccaacttttgcatttcctatttatattttcatcttacaatggactcattgaggcatgaacccatcataaattggggagcacctgaacccagtaaatgaagtgttgggtgctcccattgcctcccactgttctctatattgacagacagcttctaccccaaatccatgccaacagtgtacacttctctgtggacacctacagcaggtcgtgtgatttaacctgatactgttaggatatgaatttagtgcagactctacagtataggtcaaattctacaagaacatagaagccaagtcaaagcctaggccttccttacttctgacccactgagataggtcagggactgccacaagagggcacaaaggcaaactggctctgagccctgtgcaaggaaagcatgatgtgtggttgccttcaccctggcactctccaaaagctttgccataagacatttgattatgccgggtggtgttggtgcatgcctttaatcccagcacttgggaggcagaggcaggcagatttctgagttcgaggccagtctggtccacagagtgagttccaggatggccagggctacacagaaaaaccctgttttcatcaggacagaatgcttacagtagagaagccgcttgtgatgtacccaagctaaaattagacgtagcgatacaaatgacaaaggcggaagagaattgttattgaggaaaaactttgtcccataaaatattcttggtaaaccccccaaatcaactcagatttccagcaatctgtcagagcaaaacccacaaagcctctgtgtgtgtgtgtgtgtgtgtgtgtgtgtgtgcgcatgcatgtgtgtgcttctgtgcatgtgtgcatgcatgtgtgtattggtgctggggattgaaccgagggtcttgacacatgctatagttattccactgagctaagctctcaattcttgtttcctcttttttaattctttttttttttaatttatttattatatgtaagtacactgtagctgtcttcagatgcaccagaagagggcatcagatctcattatgggtggttgtgagccaccatgtggttgctgggatttgaacttcggaccttcggaagagcagtcgggtgctcttacccactgagccatctcaccagcccctcttgtttcctcttaattgacctaaaaatcactgtttggaggtaacacagcaaggcaatgaattgctgactctgaatcccgttagccttgacatcgctaacttgtggccttgaggacagttgcttaggttcctttgcaaaaacttaaaggctgcttttgcattgggatcgcgtgagcctgtagatggaccatagacatgagataagaagctcggctggtctcctctcctgttgttcctgccccttttgctctcttacacttggaactaaattctactctgctttgcagatagacaagctgcttatgggagaaatgtttagtccaagactataagagaacttgggaccgggcagtggtggtgcatacctttaatcccagcacttggcctatttcccattgaatcatttcttttttttcacccttgggctttctctgcagtgcagcagctaaagactgtacagtctttcggccttatccttaggctgaaaccaatcctgaggacaaagcatttatggaagaggatgacatcaagccaggtatggtggcctgtgagctctgccttggtaaggtagagatgggaagacccagaactcaaagccagtcttggatatatagtaaagtccaaggccaggctgagttgtctgagatgggagtgggtagaggagtgaatggtggccatggtggtacatgcctgcaatctcaacttttaggaggcagtggcagaaaggttgcaatatgtataaggcaagccaggaggagacaaggcaactatatcaagaaatcaaagacagaaactgagctgtagctctagtggcagagtgtttacctggtatgctcaaggccttgtactctcttccctgtatcccaaaaaacagagatgtagacgagagagttgggagtgcagggtcctctagctgtatagtgagttcaaggtcagcctagaaaccatgaaaccctgtctcaataataataataatgacatcaacaacagaagcagctcagcttctggggttaagctacggattccaggttaggatggttgaggttgtgcagagcaaggaaaaactccttgactttcaaaattctgccctgaccactgctttagttcagtctagaaaaccaaatctgttgtcttcactaagcgagcagctttttcacgtatttggcttataccagctcccttctactccagagctgaagtcccttcaggaagccttgtcacacagcatgtcctcattttgaaggccccatgtcagcagagcctgcctcctggtagcgacaagtctggctgtattcccagacttcccagaagcctcttcttgagctccatcctttgctgaaagggtccacaaaactcagggacacatctgcttctgaggagtggtttaggcaaaggtgagcactcagaatcagccagagcacagggaagatgaggaggtgaaggccctcctgtgtgaccccttcccaggctctccatagggtctctacatctctttttctgcttctatgatcagttctacctcagagattagctcatttgcctttgaagattaactcaccttctggtcccttccactctctggaggttggtggggaggtgagaactaagagttcaaccttctagtgtaagggtccatgatttgccgaagaatgacaccccagactcaaatagtatgtaaacacaaagagtgttttattctgcagaagtccagcatgctgggacctcccattaccaagatagagaaacaaccaagcgagctcgaaggcccaatttaaaacaccttaggggaatcgggaggccgatgggctttgtcttactccgtctctaaggtcattctgtccctggggcatgagggctggctggaagctgctgacctattgtcctcgtttcaggccaggtgatggggcagtttctgactagctgcctgaagtttgggtttttaggtctagtctctttaactgccaatttgaggcctgtcttggaatcagcctagcattctcaccaagtcaggatgggttccactggtggccagtcccattttccagaagccaccccagtaggataaatgcagctatgactgaaaaggctaagaaaagaacactagcctctgttcttattgctggggagaaaactcaagggtttcaggggctctgtgcccggaccttgggaaagaaggcatgattgcttagattgaaaagatctggccgggcgtggtagcacacgcctttaatcccagcattgggaggcagaggcaggcgaatttctgagtttgaggtcagcctggtctacaaagtgagttctaagaaagccagggctacacagagaaaccctgtcttgaaaaaccaaaaaaaaaaaaaaaatctgaaggagcttcaggcaaataagacagactttattcagtctggctgaaggttgctgggaaggcagtcactagttggcattctttcagcaagcacccaggcacatgtacgaactgcacacaggcagatacaactacagacagatactcacaggcagacagttgatgttggaggagagggactataggtgtacttgtgggctacttcattggattattttactaccacctttctcctcccctgttccaccctaatcccttccaatccccccaacactaggtagatctctctagactatttcctgctgattaaaggcatcaagtcccttggggcaaatccaatcttcatcctcaggatatctccaaccagcaatcgcaaaagcagcaaatgcaactgcaggaatcggcagaggcagagctgaagcagtgggagtagcagcagccacctccacaagccctctcagggctctcacatttataccctctcaagggttaccagaattccaaatgtaaactatctgctgctg

SEQ ID NO: 206 - DNA, 639 bp, Mus musculus
cacaggcaagactttggagagagcagactaggcataatggccaccttgccaccaacagccaacccttcccagcaacctctaaacctagaggatgaagatggaatcctggatgaatatgatcagtacagcctggcccatccctgtgtcgtcgggggaggtcggaaaggtcggaccaagagagaagctgctgccaataccaaccgccctagccctggcgggcatgagaggaagctgctgaccaagttccagaactctgaaaggaaaaaagcctggcgctgagacggagctggagataaggccagaccacagacaccacacccagcaatggatacaggacatcacacccagcaatggatacaggacatcacacccagcaatggatacaggaccttggagaaattaggagttgtaagcaggacctaggcctgcttgattctttcccacctaagtgaggttctggagagggagcccttccacccttccagacccagcaaaagggcaagatgggagcaagaagcagagggtagacgggcagagctaggaagacagcccccaaaagaactgtgggggaaataaatcggatgcccttgggtggcagcaacaataaatcgtacagcagtgacagcaaaaaaaaaaaaa

SEQ ID NO: 207 - DNA, 243 bp, Mus musculus
atggccaccttgccaccaacagccaacccttcccagcaacctctaaacctagaggatgaagatggaatcctggatgaatatgatcagtacagcctggcccatccctgtgtcgtcgggggaggtcggaaaggtcggaccaagagagaagctgctgccaataccaaccgccctagccctggcgggcatgagaggaagctgctgaccaagttccagaactctgaaaggaaaaaagcctggcgctga

SEQ ID NO: 208 - DNA, 21666 bp, Homo sapiens
atgccgctgcactccagcctgggggacagagtgagactccgtctcaaaaaaaaaagaaaaagaaaaagaaaataatttttcttgcaaaaatgggagcacagatgcaccgttgcggagggcgacaatgatgtctgggctcgcttcattctacatgggttggggcatggggtaggggggcacggccccttggcccgaggtgggagggtaggggacggtgtctgtggcccaggggtgggtggggtgggacaacgcattgttttcagggcactccgtctacacccgttacactccgcagcaaagccgtcccaggtctccacccaccaccccacccatcaggacaccaggaagacgcacttgacctgcaagagactgtttgaatacatcttccctaagaggatggactgatgctgcaggctggacaaaccgccaagctgagctccaaggtccccctgactgagccctgggatcctcttgaccttcagcagaactccacctttgaagtccggtacccaccaggcggctggatgagcgtgcctccatgcaggggcgctcaggcagaaagtcagccagagcagatgaaacctgaattgttatcccaaccaaaaattacagcacgatgttgccctcccttgtttttttgacatacacctgggtgttaaagacccctccatgttgaccccgtggggcatgggccagacagcccagtggaggagacgaccaggaccagccctggtgaacgtgaaaacccagaagtgacggcattggacatcagatatcagtgaccccagctggaaacagatttgatatttgagaattttcactggagcttaaatatgataagtttaggacggtagacatttttatgggtttttttgtaagtatgatcttgactaatcaaactgtctataaaagaaattgaatgggctgaatcaatggctaatatggatacctcaggggtttttgtgtggtttttttgttttgttttgttttgttttgacagggtcttgctttgtcacccaggctggagtgcagtagcacaatcttggctcgctgcaacctctgcctccccggctcaagcgatcctccctcctcagcctcccaagtaactgggactatgggtacacaccaccacacacagctaatttttgctttttgtgtgtggtgggttttttttttcttctttttttttttttcagacagctccttgctctgtcgcccaggctgcagtgcaatggcacgatctcggctcactgcaacctccacctcctggggttcaagtgattctccttcctcagcctcttgagtagctgggattacaggtgccaccatgctgggctagtttttgtatttttagtagagacaggggtttcaccatgttgcccaggctggtctggaactcctgacctcaagtgatctgcctgcctaagcctcccaaagtgtggggattacaggcatgagccaccgctcccggtcttaatttttgtatttttttgtatagacgaggtctcgccatgtggcccaggctggtctcaaactcctgggctcaaccaatgtgccctcctcagcctcccaaattgctgggattacagcgtgagccaccacgcctggcctcgtttttttttaacagtgctaagaggtaaggaggactccctaggagcagttcgcagtggcagggaggcatattttattactgacattgttgagaattgatagtgataataaaaggcagaatgatttggatcagtttaattattaagttctttatagacagcctggatcagggtaggggactgctcccactgccctgtcccaaaatgctcccttaaaattatttccagatatttaagagctttatggcatgacccaattgctataaaaattttaacttgaaggaaaatctatactataaagtaatcgtttctttaaagatacattttaagcaagagggtttggaaaaatctttatgtctacacctggtaagcacaagccatgtatattccgtttttctttctttctttctttctttgtttttgtaaaaaaaatttgttttgagccagggtctcactctgttgctcaggctggagtgcaggggcgcaatcaccgctcactgcagccatgacctccccaggctcaggtgatcctctggcgtcagccacctgagtagctgggaccacaggcacgagccaccacacctggctaacttttgtattttctgtagagatgggaatttcgccatgttgctcaggctggtctcaaactcctggggtcaagccatccgcctgccttggcctcccaaagtgctgggattacagcaccaggtccagccatttcctttttttctatgcaagagtattgatatatgtactgaatcatcccatacttgccaatgtatgtgatcacatacttatcttgctgggatcacaggcaagagccactgcgcctggcccaagtttactttttttttttggaaatggagttttgcttttgttgcccaggctggagtgtgatggcgccatctcggctcaccgcaacctccgcctcccgggttcaagcgattcttctgcctcagcctccagagtaactgggactacaggtgcccactaccacgctggctaattttttgtatttttagtagagactgggtttcaccatgttggccagactggtctcgaactcctgacttcaggtgatccacccgcctcggcctctcaaagtgctgggattacaggcatgagccaccacgcccggccccatgtttacttttatagtcccagcaccaagcaagtgcctggcacatggttagtaccctaaacatttgcagactggagaatgcatgcctctctggtctttactttcctcttctgttaaatggggtcgggtttgctgatctcccagaagacatcagtaataaaatttattattttagattttttgcttctttcttttcttctttctttctttccttccttttttttttttttttttttttttttttgtgtgtgtgtgtgtgtgacacagagtttcgctcttgttgcccaggctggagtgcaatggcgcaatttcagctcactgcaacctccacctcctgggctcaagcaattttcctgcctcagcctcccaagtagctgggattacagccatgtgccaccaagcccggctaattttgtatttttagtagagacggggtttcaccatgttggtcaagctgatctcaaacccctgacctcaggtgatccacatgccttggcctcccaaagtgctggcattacaggcataagccaccgcgtccagccttattctaggtttttctactactgtgttttatgtggctgtctattttagttgtcaggagaaaatgtcacacctctattatggtgaaaactgtgtattactcatagttatctatacatttaatgcaaaaatataatttgtagtgtacatgatgttctgcaacctgtgtttttcattaggaatgtattatggacatctttctcatcagagatagagatacattctctctctaaagagtattgaatggctacagtgtttcacagaaggaaactgatcagtcacctactgatggacatttaggttgtttccgatttttggtttttgctttttttagagacagggtgttgctctgtcgcccaggctggagtgcagaggcaccatcatggctcaagccatcctcctgcctcatcctcctgagtagctgggactacaagtacacaccaccatgccagtctttttttttttttttttttaagatatggggtctcgctatgttgcccaggctgggtttcctgtttttcactactacaaacaaatgaacttccttgtacctgcctctttactcacctctgggaagatttctgtaggagagactcctgaaagtgggactgcaatatcagggggatataagcatttcaaaatcttatcaatgttgccaaaccacccattaaagacagcatctggctgggcgcagtggctcatgcctgtaatcccaacactttggaaggctgaggcaggcggatcacctgaggttaggagttcgaaaccagcctgaccaacatggtgaaaccccgtctctactaaaaatacaaaaattagctgggcatcatggcatctgcctgtaatcccagctactagggagactgaggcaggagaatcgcttgaacccgggaagcggaggttgcagctagccgagattgcgccactgcactccagcctgggcaacaagagcaaaactccatctcaaagaaaaaaaaaaaaagacagcatccactgatatttaaaacgatgatatcacacagccaagaaaacttgcaaatgcagctgccagatttgacatttttatctgggatggggttgtgagatcatatggatatattttgtttaacctcatttagatttcttgtgtcctcttggaacacagcgatgtccaatccaccttaattacgtattctgccttcagcctgggaagcttctgttcctttgagctagtgacttcgtacatccctcaggctatccaacagagaggaagtcttgctgtgttgcctaggctggagtgcagtggtgcgatcatggctcactgtagcctcaacctcctgggctcaagtcatccacctgcctcagcctcctgagtacttggagctacaggcatgcaccaccacgcctggctaacttttggattttttttgtaaagatgagatctcgctatgttgcccaggctggtcttgagttcctgggctcaagcagtcctcctgcctcggcctcccaaagtgctgggattacaggtgtcagcctttgcatctggcccacaaacagccattcttgttcaaactttgcctccaggcctggcgtggtgactcacgcctgtaattccagctatttgggaggccgaggtaagaggaccactttagccaaggagttcaagaccagtctcggcaacatagggagacctcatctctacaaaaaataaaattagctgggcatgatggtgcgtgcctaaagtcccaactacttgggaggctgaggtgggaggatcccctgagccctagaggtcgaggctacagtgagcaaggttgctccactgtattcagcctggacgacagagtgagaacctgtctcaaaaataaataaataggccgggtgcgatggctcatgcctgtaatcctagcactttggaagccgaggcgggtggatgacttgaggtcaggagtttgaaatcagtctggccaacatgatgaaaccctgtctctactaaaaatacaaaaattagctgggtgtagtggtgcatgcctgtgattccagctactcaggagactgagacaggagaatcgcttgaacccgggacacggaggttgcagtgagccgagatcgtgccactgcactccagcctgggtgacagagcaagactctgtctcaaaaaaaagagaaaaaaagaaaaaagaaaagaaaattaaaattaaattaattaattaattaaaaataaaagaattagaaaacaagcttcacctcctccaggaagtgtgccttcatctccctatctccagagaggttaggtgccctcctgggagctcccagccctctgcgtttactccaagctgatggcgctgggttgtcataggtgtgcctagcaacgtcacgaaggtgtaactctaagcaggaagaaaataaacttcctcgtggcagattttacatgcacctggaggcttgaggatgggaaaatgaaaccatccctgtaaacctcatgcaattaatcagagaacagagaggagaaatggaaacaagccaggcttgcagcacacccagcgctgatcatgaggtcagctgccccctgatctgcttcctcttagttgtctggtgcctgctgttctagaatcacgtagacctggttacaagatcatagttccccttaactgcactagagatagcaacttgaacgttatgaaacattaaatgttacttttgagaaattccttcaggtcctgcgtgccggtgaagcgactgactccgccagcctgaaggaccccaccaggagctaactccccaaaaatgtctttttcacatcatgatgatttcatttcccttgctctgaccaatgaccccaattttctagcctctcaccctccataatccccttaaaagccccatcccagaattccctggggagatgcattcgcaggtctcctcctatccccttgcacagtgccctgtgatcatgaaactctctctactgcatccctgctgtccagtgtaatagggctgtgacagggcagcaggcatacaaatctgctgttcctgtaacaaaaagcacacctctacgtctagatggagccacgtctagagccctgcagatccatgctagaggggttccagcaggctggagtacaatggcgtgatctcggctcactgcaacctctgcctcctgggttcaagagattcttccgcctcagcctcccgagtatcttgaattacaggtgcatgcctccacgcccagctaatttttgtatttttagtaaagacggagtttcaccatgttggccaagctggtcttgaactcctgacctggtgatccacccgcctcggcctcccaaagtgctgggattacaggcgtgaactaccgcgcctggcccttttttttgttttgttttgttttttgagatggagtctcgctctgtcgcccaggctggagtgcagtggcgcgatctgggctcactgcaagctccgccttccgggttcatgccattctccagcctcagcctccccagcagctgggactacaggtgcccgccaccacacccggctaatttttgtatttttagtagagacggggtttcaccatgttggccaggctggtctccaactcctgacctcaggtgacccacccaacctcgtcggcctcccaaagtgctgggattacaggcgtgagccaccatgcccttcctccttctctcataggcttctttcttccagcacctgtaagatcaaggccagggagacctccttccctggctccatctgggacaatcacagtgtttctgtggtcccctgtgaggctacaattcgcctctcagttcctgcattgcagagcaggtggaagctgagcaagcaacactgatcttagcagagcctcatgtattcaactagacatttactgagctcagactgagtgccaggcattgaggatacaatatggcaggcaagattcctgccccgagaataatgataattaaaatagcaagcatttattgcacactgattatcttctaggcactgcgctaagcatttttttttttttttgagaccgggtctcactctgtcgtccaggctggagtgcagtggcgcgatcttagctcaccgcaacctctgcctcctgggttcaagcgattctactgcctcagcctgctgagtagctgggattacaggcacacaccaccacgcctaggtaatttttgtatttttagtagagacggggtttcaccattttagctaggctggtctcgaactcctgatctcgtgatccacccacctcggcctcccaaagtgctgggattacaggtgtgagctaccgtgcccggccccaaccttcttttctttttctttttcgagtgcagtggcacgatcatagctcaccgcagcctcaaactcctgacctcaagtgatccttccacctcagcctttcaaaacagtgggattgcaggtgtgcctcaccttatccagcctaggtgccattaatcccactgtatagacgagtaaacaaacatgcagactaagcttgtctaagagcacacagctaactagggggcagaaccaagctttagacctgagaagccctgttccagagcctactcctttaaccattaactaaactaaaccaacggttgcatgccagtggggacaaataatggtaaagcaaacaaataaaaaagatactggccaggtggctcacgcctgtaatcccagcactttgggaggccgaggcgggcagatcacctgaggtcaggagttcgagaccagcctggccaacgtggtgaaaccccgtctctactaaaaatataaaaattagccgggcgtggtggcacaagcctgtaatcccagctactcaggaggctgaggcaggagaatcacttgaacccaggaggcggaggttgcagtgagccgagatcataccactgcactccagcctggtgacagagtgagactctgtctcaaaacaaaaacaaacaaaccaacaaaaaaaggatggagtcttgctctattgcccaagctggccttgaactcccagcttcaagcaatcctcccagcttaccctcccagagccctggaattacaggcatgagctaccgcactaggccaatctttgcttaatttaagattattttcctctttctctgatcacctggtctgttattattggcccaatcctgttttcattcaagtatcctgtcttcactttcatttcctgggtgttaaggaactcatacatcatccaaatctgggaaaacaaaggctaaattcaattccggctcaggcaagggagaaacacaagcagaagttcagctttttgtgtttttgtttttgttttcagacacagtctcattctgttgctgaggctggagtgcagtggctcgatctcagctcaccacaacctctccctcccaggttcaagcgattctcctgcctcagcctcctgagtagctgggattacaggcacttgccaccacaccaggctaatttttgtatttttagtagagatgggatttcgccatgttggccaggctggtcttgaactcctgacctcaggtgatccacccactttgtggatctcccaaagtgctgggactacaggcataagccaccacgctcggcctcattgtgtcttctgcctcagtacatccatattttgaaatacatattattttattataatttgtttttgagacagggtctccctctgtcaccgggcactgtagcatgtgtctttcaaacattatctcatttgatcctctccccaactctaggaagaagatacaattattatcatccttattttacagaattggaaaccaaggcacagagaggtgaagggactcgcccaaggtcacacggaaagtggtgggtcaggggattgaactgagggcaactggctccagaccctgaactctccaaccctctgccaccctcctcctaggtgagggagattacattactggggaccctgtttcaggatattaaggggttttccaagatgtttctcatagaaaaaagaaaaaaaagggtgtggctcatgcctgtaatcccagcactttgggaggccgaggcaggcagatgacttgaggtcaggagttcaagatcagcctgtccaacatggtgaaaccccatctctactaaaaatacaaaaattagccaggcatggtggcagatgtctataatcccagctattcgggaggctgagccaggagaattgcttgaacctgggaggaggaggttgcaggttgcagtgagccaagatcacaccactgcactccagccgggcgacagagactccatttcaaaaaaaaaaaagaagacaagcaagatgttgagtgtgactgggtggaagccactgacttgtccctggcacaagtgtgctgatatcccttccccctccttcctcacgtcctgcatctcagcgagaattggggtgccggggttagctgtgtggccgtcatcccaggcccaggtgaagccctcgatcaggtgaggccatgatcccaacgagtgttttagcccagatcctgcctcttccctgctttctgccgagaagcgggacctcctctatggaaaatatccagctgggtgagcctgggagggaggaggtgagttgggctggactcagggaccgactcttcccgtctcatgactgtgtttactgggctggattttgggaaggggccagattgcatcagacagggcctgatgggctggagccagactgtggtctgaggaggagacacagccttataagctgagggagtggagaggcccggggccaggaaagcagagacagacaaagcgttaggagaagaagagaggcagggaagacaagccaggcacgatggccaccttcccaccagcaaccagcgccccccagcagcccccaggcccggaggacgaggactccagcctggatgaatctgacctctatagcctggcccattcctacctcggtaaggcccactcagccatctccacggtccttcctcctctcccgaaatcaggacccacccctcttgtttcctctcatttcctttcctttcctcttcgtttctttctttctttttttttgagagagtcactctgtcacccaggctggagtgcagtagtgtgatcacaacaactcaaacaactcaccgcagcctcgaactcctgggctcaagtgatcctcctgcttcagcctcctgagtggctggaacttcaggtgtacaccacctgcagtggtgagatggggtctcactatgtttcccaggctgatcccaaattcctgggctcaagcaattctcctgccttggcctcccaaagtgctgagattacaggagtgagccaccctgcccagcccactcacccttttctagccaacctgttccttggaccctcacgtcacccctgtctaatcccttatcccaggagtgctatgttactcagcctgggacctcacacacatctggggtcccacattccacagaggggaagcagcaggcttctccctgctcttcccatccccacaaccctgaacccctgcctctcctctgacagggcctctcatcatgcctatgcccacttcacctctgactcctgccttggttacaggaggtggaggccggaaaggtcgcaccaagagagaagctgctgccaacaccaaccgccccagccctggcgggcacgagaggaaactggtgaccaagctgcagaattcagagaggaagaagcgaggggcacggcgctgagacagagctggaggtaaggagtcggggggcccagagagctcaaggtggtgcttctgccatgaaggacaggccggaaggtgtgtgattgggtggggaggagggatcaggcaactgttgtcttgatgcagaataaaacgagacatatgtttgattgtgagtttcctagtggccagagcaaagtgggaacacagaacctttccaattgaagggaaatttgacttacagagacagaaattgaggatagagagggtgggtccttccctggagtcacaaatcaagtgagtgggagaggcagaattagaacccagatctctgtcccttttaccacctgcttttcctcaccccccagatgaggccagaccatggacactacacccagcaatagagacgggactgcggaggaaggaggacccaggacaggatccaggccggcttgccacaccccccacccctaggacttattcccgctgactgagtctctgaggggctaccaggaaagcgcctccaaccctagcaaaagtgcaagatggggagtgagaggctgggaatggaggggcagagccaggaagatcccccagaaaagaaagctacagaagaaactggggctcctccagggtggcagcaacaataaatagacacgcacggcagccacagcttgggtgtgtgttcatccttgttctttgtgtgtttttgttcgggcatgtgtgtgcttgcctgtgcctgcacattcatgagcctgagagagcatctttgatgtgtatttgtgtttggtgtatgtatctggggcagggagtgttcctgctcttgcagggtctacgctgtgaatgcagcttttggtttgtttgcttttgcttgcatatattttagtgcatacatttctgtgggctcctacgtagtggaaaggaatttcttctgcttttttgcgatactgcccatgaaacacggccctccccagcacctgtttttgttgattgtgtcctgttcatagacgggaacgctacttatgagtgccatctaaaagtcagagaaaactgagatttaaaatattaaaagccagggccgggggcagtggctcacgcctgtaatcccagcactttgggaggccgaggtgggtggatcacaaagtcaggagttcaagaccagcctgaccaacatggtgaaaccccatctccactaaaaataccaaaaattagccaagcatggtggcaggtgcctgtaatcccagctgctcaggaggctgaggcagtagaatcgcttgaacccaggaggtagaggttgcagtgagccgacatcgtgccattgcactccagcctgggtgacagagggagactctgtctcaaaacaaacaaacaaacaaaaactaaagtctgggagcagtggctcatgcctgtaatcacagcagtttaggaggccgaagtgggaggattacttgagcctaggagtttgagaccagcctgagcatcatagtaagaccccatctctacaattttttttttgagacagagtctcactctgttgctcaggttagagtgcagtggcaccatcttggctcactgcaacctctgcctcccgggttcaagcaattctcgtgcctacgccccctgagtagctgggattacaggtgagcaccaccacgcctggctaatttttgtttttttgtttttttgatacagagtctcactctgttgctcaggctggagtgcagtggcatgatcgcagctcactgcaacctccgcctcctgggttcaagctattctcctgcttcagcctcctgagtagctgggactacaggcacctgccaccatgcctggctaatttttgtatttttagtagaaacagagtttcaccatgttggccaggatggtctcaatctcttgacctcatgatccacccaccttggcctcccaaagtgctgggattacaggcgtcagccaccacgcctggccaatttttgtatttttagtagagatggggtttcatcatgttggccaggctggtctcaaactcctggcctcaaatgatctgcccacctcagccttccagcctttgggaggccaaggagggaggatcgcttgaggccaggagttcgagaccagcctaggcaacataccaaggccctgtctctacaaaaatttaaaaattagcaaagcatggtggctcatgcctgtagtcctagttgctcagaggctgaagttggaggatcccttgaacccagttggaggctacagtaagccatgatggtgccactgcactgcagcctgagcaatagagtgaaaccatgtattgaaaaagaaagaaagaaagaaagagaaaaagaaggaaggaaggaaaagaaaggaaggaagaaagaaaagaaagagagaaaggagagaaaaagaagaaagagagagaaagaaagaagaaagaaagaaagaaagaaagaaagaaagaaagaaagaaagaaaggaaggaaagaaagaaagaaagaaagaaagaaagaaagaaagaaagaaagaaagaaaagagcgagccccggcacagtggctcacacctgtaatcccagcactttgggaggccaaggcaggcggatcacctgaggtcagtagttcgagttcgaggcagaagttgtggtgagccaagatcacgccattgcactccagcctgggcaacaagagcaaaactccatctcaaaaaaagaaaaagagagagaaagaaagagagaaggagggaaagaaagaggaaggaaaggagggagggaaggagggaaggaggaaaggagggaaggaaatattaagggatttgccctagctcactcagggctcatattcagggatcttattgtcttcagatatgaggtgggtccccaggccaagggggctgtgggacagggttctgggaagtgagatgggggagggagattcttattcagtgctatgtctcaggaccagagttgaagaaaaatatggggcaaacaggaagtgtggttggagctgagattatttgttgattgagatacaggtttgggttgctattatgaagaatcaaaacaggatacaaagttactcctctcttacttagccccaagtcctcctgggttcaaatggcagctccattgtgttgaggattccagctatttttactcactgttctgccacacccaaaacatggcttccactttgaggcccaaaatagctactccaatacctgccatcacgtttgcatctcagcctgtggaaagagtgtggaagagacagaggaggccacacctcttcaattttagggcataatctaaaagtagaacacatcacatctgctccgaatgtggctacatggccacacccaactacgagagaggttgggaaatgtagcattgagctgcttagccacgtggtagccaaaacttgggcaacagcagggttttatgatgaaagggaaccagagagagtgaatacacgaagaagctagcaagaaacattgcccacatgcagactcaacagatgtcgggggagaaaactctgagattgggccccgggcagagcctgtttccttttcccctgtccctttcacataagccccacactgcagaacttggagtcagtggttcatggggacccaaggacatccacagaagaccgaagtacctgatagagcaggaacagatgcacgtcagactacgaccagcttgaacccttggggacctgtatccatccccttcccttgagtccagcctaatcacagccacagaatgaatccatgacccggaaggacatttaaggacctctggcccaactctccccacgcaacagtgggattgcctctgcttgtttgaataccactatggagggggaacttgctacatttaaaggttgctgaatttttttgttttgttttgggagatggagtctctctctgtcgcccaggctggagtgcagtggtgtgatctcgacccactgcaacctccgcttcctgggttcaagcgattttcatgcctcagcctccctagtagctgggactacaggtgtgggccaccacacctggctaatttttgtatttttagtagagacggggtttcaccatgttgcccaggctggtctcaaactcccgacctcaggtgatctgcctgccttggcctcccaaagtgttgggattacaggcttgagccacaccacccggcaaaggttgcctaattctatctcagggcaagtctgttcatgtgggctgaaatctgtctctcatacctgcccttaaataagcttctgtttttctggtcctttctgtctgagatgactttaattcctcccccgaccccatctcatgaggctcagcttagatgtttccttctcttcctccctgatggctgcgtgcagaagctcatacctgcaatcccagcactttgggaggccgaggtgggaggattgcttgggcccaggagttctaggccagcctagcaacacagcaagaccctctctctacaaaaaattaaaaattagccaggtgtggtggcttgtgcctgtgggcccacctactcaggaggctgaggtgagaggatctcttgagcctgggaggtggaggctgcagtgagccatgatctcactccagcctgggcgtcagagtgagacctgtctcaaaaaaacaaaaaccaaagttttccttaacttgcaatcctccacccatctcctgacctccaccccaggccgaccctcctctgggatcacacggaagcctgggcccagaatcttacagtctaccttggaaatccttcagattttgcctccaactcctctttccatacaagttacatattaactcaatcaatgcttattggatgccttctgagttaccaggatgctgctggaggcctgtgctgctgagagggacaaatagaatcctgatatgactggaaccaggaatagggccaccatcagctctagaacccagggagcaaatggcaggagcaacaccaggcagtcggccctcagcccagcacagacctggtgtgttggcttcagaaaatcctggaaacatctctgctgtgtttggagctcctattctgtgagaagtgttttataggctttgctccatttaatccttacgataacccaataggacatactattaatgatcccctttttttcagaccggaaaactgaggttcggagacattaagtaatttgcctaaagtcacacagccacatcctgtaggacttggaattatgaactcaggtctatctgaattttaaagcctggatttttccccctttgctacatgcctgggaagaaccatgtattgacaatgaagaatcctaaactctcgttaatttctggtcaattactcctctgggcctgggtttcctcacctgtcaaatggtgagactggcctctcttctgtcaaaagagaaaatgaaggctgggaagcactgtgtccctagctggaatggccactccctgtcctgggtcctttgacaccagccaggagtcctcacacactgcccctccctcctggcctctgattggcctttcctggcctcgccctcgcctggcacagcctctgcctgagaggcctttaagtggctgttctgggaattaaggcaattcttggaattgcagaatttttggatccgaaaggatcctacccagactcttcctcttctgtctccatcccctttcctaaaccctttctttttcttctggttgcatgtctgtttccccattttggggggatccccctgagaactagagaaatcactgacctctgtcctaccccaggggcttacagaattggccctgtcaggcttctgtaactcaaaggactcccgactccttgcagagaactgagaaactcaccatggggttgtctgtctgttctgcaagcaacctgattctcttccaccttcccctttctcaaaggccagctcacagatacaggagtacatttttaaatttcagaatcaccctcagttttctcctttttgagacagggtttcagtctatcacccaggctggggtggagtggtgcaatcactgcagccttgacctcctgggctaatttttaaatttttcgtagagatgaagtctcgctgctatgatgccaaggctggtttcaaactcctgtcctcaagtgatcctcctgcctcggccttccaaaagtggtgggattacaggcatgagccaccgtgcccagccccaaaattgattttttaactaaaatcccctaaagttaatgctaatgacagtaatagttccagctaccactattgataatctaccttagggttttcccaacttcatctttcccatagcacttttgtgattgatttctgctgtctatacattcaaactatactatatatattatgctatatttacttagcatttaaaaactacctcctgccagtcacagtggctcacgcctgtaatcccagcactttgggaggccaaggcgggcagatcacctgagatcaggagttcgaaaccagcctggccaacgtggggaaaccccatctctactaaaaatacaaaaatcagccaggcgcagtggtgggtacctgtaatcccagctactcaggaggctgaggcaggagaattgcttaaactcgggaggcagaggttgcagtgagccaagatcgttccgttgcactccagcctgggcaacagagcaagactctgtctcaaaaaaagaaaaaaaaactacctccttatccttttcactcaaatatacttaaaaaggaagctacagcatataaccaccaacaatggaaaaccatggtcatatgtcataattagaaattaattgtaggccagacacagcagttcacgcctgtaatcccagcactttgggaggctgaggagggtggattatctgaggtcaggagtttcacaccagcctgaccaatatggtgaaacaccatcactatcaaaaacacaaaaaaatttagctggacatggtggcaggcagctgtaatcccaggtactagggaggctgagacagaagaatcgcttgaacctgggaggcagaggttgcagtgagcggagatcgtgctactgcactccagcctgggcaacagagcaagactctatctcaaaaataaataaataaataaaataaattaactgtaaaggctgagcatggtggctcatgcctgtaatcccagcacatttggaagctgaggtgggtagattacttgaggtcaggagtttgagaccagcatggtgaaaccccatctctactaaaaatacaaaaattagctgggtgtgatggcacacccctgtaatcccagctactcaggaggctgaggcaggagaatttcctgaacctgggaggcagaggttgcagtgagccaagatcgaaccattgcactccagcctgggtgacaagagcggaactccatctcaaaaaaaaaaaaaaaaaaaaaaggaaaggaaaagaaattaactgtaaaaagaaataccgaagttagccagtgtggtggtgtgtgcctgtagtcctagctactcaggaggcttaggtgggaggatcgtttgagcccaggagtttgaggctgcagtgagctgtgattgcaccactgcactctagcctgaacaacagagcaagaccctgtctcaaaaaaaaaaaaaaaaaggaacacttaactaaaactttttttaaagttcatccagccaggcgcggtggctcatgcctgtaatctcagcactttgggaggctgaggcaggcggatcacctgagttcgggagtttgagaccagcctgaccaacatggagaacccttgtccctactaaaaatacaaaattagctgggcgtggtggtgcatgcctgtaatcccagctacttgggaggctgaggcaggagaatctcttgaacccaggaggcagaggttgcagtgagctgactccagcctgggcgactagagggaaactgcatctcaaaaaaaaaaaaaaaaaaggccaggcacggcagctcacacctgtaatcccagcactttgggaggtcgaggtgggtggatcacctgaggtcaggggttcaagaccagcctggataacatggtgaattcccttctctactaaaaatacaagaattaggtgggcattgtggcacttgcctgcagcctgtagtctcagctacttggaaggctgaggcaggagaatcgcttgaacctgggaggcggaggttgcagtgagctgagatagcgccactgcactctagcctggtgacagagcaagactccgtctcaaaaaaaaagaagaagaagggtagggcgtggtggctcacacctgtaatcccagcactttgggaggccgaggtgggtagatcacctgaggtcaggagttcgagaccagcctggccaacatggttaaaccccgtctctactaaaaatacaaaacaaaacaaaaattagttgagtgtggtggcacgagcctgtaatcccagctacttggaaggctgaggcagaagaatggcttgaacccaggagacagaggttgcagtgagccgagatcgcaccactgcactccagttgggtgacagagctgagactctgtctcaaaaaaaaaaaaaaagaagaagaagaagaaaaaaaattatgggagatcattgttttgggttgagctgctgcactttaggccccaacagataagaccaaaccaaaatgtagttactcatgctaaatgtcacataatcaaactgaaactttaaggaaggagatagatcccaaacagaccagtttttcctgaaaacaggagattccagtcaacctgagtcagtgtaatattggtcccctttgctttaactctcacaaaaaagtcacctgaaggaacctcatgttaaccaatcagcttttttcctattgttctgtttccttggccagtgagagatcttgattctgttttgtagaatgaaagctgtaccaattcatgaattgcaaataaaagccaattagatctatatccaaaattgttgtcattttgtcttttgacacggtgaaaggtgaataggagaaactccaccttggtttgtatataaaaatattatccaggatggtggctcacgcctgtaatcccagcacttcgggaggccaaggcgggcagatcacctgaggtcaggagttcaagaccagcttcgtcaacatagcgaaaccccgtctctactaaaaatacaaaaattagccaggcttggtggctcgtgcctataatcacagctactagggaggctgatgcacaagaattgcttgaacccaggaggcaaaggttgcactgagccgagaacactccactgcactccactgagccactgcactccagcctgggagtgagactgcctaaaaaaaaaaaaaatctagccacagccattattatcacactggatatttaccaaagcctgcactagggaaaaacacctgggtcacgggttcactgctggttggaggctgagccaagagcaaactaagtgtgctgatacccatgcccctgatttctagggagttctgtggccttcagggagtcccaggggagcaagattagagcacccagtccctgagtgccctgctatcagcggccttgacagaggcgatctctccttggtggctggaatcagcatccagggctctgtcaactattagagaaacattttattctttttgtaaaacaaaagttctcttttcttttctgattacaaaagaagttattgctgtggaatcgcaagataatccccatcctctggtctgtctgtcctttgttcccatgactgaactccaacttttgcaaaacacttacttttattttatgttttattctagagacaggctcttgctctgctgcccaggctggagtgcagtggtgtaatctcggctcactgaagctttgacctccagggtctcaagtgatcctcccacctcagcctcctgagtagctgggactacaggcacacgtcaccacaccctaatttttgtatatacacacacacacacacatatatacgtatatatatgtgtgcgtatatgtgtgtgtgtgtatatatatatatagtgtgtgtgtgtgtgtgtgtgtgtgtgtgtgtagagatgggtagggggtgggtctcactatgttgccaaggctggtcttgaactcctgggctcaagtgatcctcctgccctggccttccaaagtgctgggattacaggtgtgagccaccatgactgccctgcaaaaacatttaaattataaaattaatgtttctttgtcagcacttcatggaatcagtacttcatggaattctcatatcagctttgtatcctgttctcttttctggaaactagttcggaaagtttcatttcttttttttttttagatggagtcttgctctgttgcccaggatggagtgcagtggcgtgatctcagctcactgcaacccctgtctcccaggttcaagcaattctcctgcctcagcctcctgagtatctgggattacaggtgtgtgccaccatacccagctaaattttgtatttttagtagagacggggttttaccatgttggccaggctggtctcgaacccctgacctcaggtgatctgcctgcctcagcctcccaaagtgggattacaggcatgagccaccgcgcctggccagaaaggttcatttctttaactgtttggggaaatatcatttattccctcgacaaatactttctgagtacctaccatatgccagggaatagtctaaaact

SEQ ID NO: 209 - DNA, 719 bp, Homo sapiens
cagccttataagctgagggagtggagaggcccggggccaggaaagcagagacagacaaagcgttaggagaagaagagaggcagggaagacaagccaggcacgatggccaccttcccaccagcaaccagcgccccccagcagcccccaggcccggaggacgaggactccagcctggatgaatctgacctctatagcctggcccattcctacctcggaggtggaggccggaaaggtcgcaccaagagagaagctgctgccaacaccaaccgccccagccctggcgggcacgagaggaaactggtgaccaagctgcagaattcagagaggaagaagcgaggggcacggcgctgagacagagctggagatgaggccagaccatggacactacacccagcaatagagacgggactgcggaggaaggaggacccaggacaggatccaggccggcttgccacaccccccacccctaggacttattcccgctgactgagtctctgaggggctaccaggaaagcgcctccaaccctagcaaaagtgcaagatggggagtgagaggctgggaatggaggggcagagccaggaagatcccccagaaaagaaagctacagaagaaactggggctcctccagggtggcagcaacaataaatagacacgcacggcagccacagcttgggtgtgtgttcatccttgttaaaaaaaaaaaaaaaaaaaaaaaaaa

SEQ ID NO: 210 - DNA, 249 bp, Homo sapiens
atggccaccttcccaccagcaaccagcgccccccagcagcccccaggcccggaggacgaggactccagcctggatgaatctgacctctatagcctggcccattcctacctcggaggtggaggccggaaaggtcgcaccaagagagaagctgctgccaacaccaaccgccccagccctggcgggcacgagaggaaactggtgaccaagctgcagaattcagagaggaagaagcgaggggcacggcgctga

SEQ ID NO: 211 - DNA, 54786 bp, Mus musculus
  misc_feature (8049)..(8121): "n" at positions 8049 to 8121 can be any base
  misc_feature (28335)..(28354): "n" at positions 28335 to 28354 can be any base
  misc_feature (36124)..(36143): "n" at positions 36124 to 36143 can be any base
  misc_feature (50300)..(50319): "n" at positions 50300 to 50319 can be any base
catagctttggccaaacagcatagctttggtcctgagggtagactaaagcagtcctaaacctttgtgtctttcccagcttgctgaacaacccaaagtagaaacagagcgcctactcagagtactagcagttttaaaagtttaaactccacacaagttcttttacaaaagagtccacccttttatgtacctttaaaaacatttagccactttattcctttgtgtctttgaagaggaaaaaaaattaataaagttgtagggtccttttgaatttagaaaacgttggcaatgtgggaaagaaaggcattcagcatttcaaagttctggtgaggaaggaaaaaaagattctgaataaaacaattttatgtgattttgcaggtggtttgagctatcattttatatgtacgtttgtaccactgctcattggaatgttcatataatactgacctaattatgcatagaaaaagataagccatttacttgattcatttcttctttttaaatcaagaaaggaacaaaaaggctcctattttctgaaagaaattgttcgcttttattgcagaaaagtagcagcttgtgcagagctagaactgtaacaattttatattccaaaggttttgtgtgtattcggttagttacagtaattatacccaataactgacagccaaaatcacgtaggagaaagcaaaggctgttttctcacacgggccctgctgcagaacatctgctgagagatttgcatattaattaacccatattaactctaattattctgggaaattatcaaataaattgaattttctaattttaacctttcttttacttgacgcgtgtcgaggctgagaggacgcaccaggccgtctcacctgggcaatgagcaaaggctcttttctccccctttgctcctttaggcctggggcagcctggggagcctttgtgtgccttgtgcttttttggcttctgtgcttggtagggtctccgtgcatttgttgagagagagaacatgtgtgcctgtgagcacagatggtggatttatacaggggtgaggaaaggtgctacctcagaacacttgagcaaaccttaagttgtttttgtgcgttgttttgttttgggtttttttttcttctttctttctttctttctttctttctttctttctttctttcttcctttctttctttctttcttttcctcccagcctgttgtttaggcctgagcaaataaatgggagtttaattcaattagagcctggctttagtcagtgcctcatgacagaaattattcaatatttttcccctcacattgtttggtttacacatcagtgactcccttccttttgtactctgtttagagtggccataatgtgttgagcttttgtgtctgagatgtcactgtccctttcaccgttgtctggttctgtcaattgtgaggtgcaatgacgctattttgcaaacaggcctctgagaagggtactgctatgttagccgaggtggcttcacagtaaattattttattagtctcacagacctgaacctaatcctctgggtagggagatgaagtttggaagtcatccttgggtattagacgtaacataaaacagagatttctaggacaaatcctgtaggggcggcatgaggagctcaactcactggcatgatcttgttttaggtgtttctttggggtaagagacaagatttaccaagattaagattctctgcatgtgattaagtttgtaatgacccatggttttaagccatggtgatcaggcgaaaactactgatttaatctgtatgaggaacaaagtcttccacaactgctttctgttgagccacacctctccaaagacagatgactctgtattcccccaatgatttcactgcccctacccaccaagatttattaaggtgatccacacccctggctgccttacaggggattattttcttctggaaaagctgtccttcctattattccacagctgggttagacacaccgctgcagcctcacagaacattacttagacccaagaattattattgacaccagtacactgcagcaaccaagaaactcaccaaataggtctgtccgactgacacatacttgagaacagtttgttttttttttttttttaatagattgactagaactggcacagaaaatcttttgctgggaaaacatttctttaatatgtttttacttcacgtgaggatatagattcaagttactctgtgtgtgtgtgtgtgtgtgtgtgtgtgtgtgtgattaatttggtgggatgaaatggctaagtgtatatcagtatctgtatcttagaaaacttcgctatcacagatgaggttcacgggtggggcaaatctgtaacaattggagaaaaatattaatagtttttctagtctgtaatttttttttttacaaaacattccaaagtatcctgaaagttactgaccttacaccttttatggactttgaaagttgtgtaaccttttcaggggaaggtgacagacacaatatctaattacacaaggacatacttcccatcttgtgatacttgctttattcaaggttttattcccaaggccttatgactataaaacttaaagctagacaaggtctgccctcatttctgataaaagaaaaaccccaaaacaattctgatggcccagagcatattattttctacttacaggtcctaaataaattacagttcttttcacatgcctcaggaatggcaatgaacattcttttcatgttgcctcttatgactttgctcgggccggtttacatatagcaactcattgcatgatcatgaagcccaatagttagagaatcttctaaactccttttgctctttggacatgctgttggtagacataaattcatttggtattaataagagtaataaggctctgaagaactgatgacgaatagatacacaatgtatataaaatggatttgtagagcaattgttttgaggttttccagaaacatgctatcaggacaggctcgctgatacaggtactttgggacacattgtttagccagtgatgggattagctatgtggtctatctttggactgcagatatagacagggagtgaagctgaaaaacattctgaaggatggaaataaaaactacaaagacttgctggataaaaacagaatggagcatgcttgaaccaacagtacaatgactactttcctttggcaggggttgagcaaggtgatcacaatcattgagtcatagatatacaggaaaaccaaacatatttactttaaaaaagaaaagaaaagaaaagaaacagatgtcaaagctttgggaaatcatggtttttcacttagaacacggtgacctgggaataaagtgtcttgtattaaaagataactgacttcactattacacattctttgactaatatctgttttatggagatggcaaagggagtcttgcttttgttcacatctgccatcaccttttaatgtttcctatgttaagcaagaagtttagaggggaaatcagatacctaagatgccactaccatgtgcaagtttaatcagaacctctataactttatggaaattttctttttaacaatcagtatcatactaaaatttggaaacagtagtgattccagttggatgagaagctgccagtctccctaagatgctcctgtaacagggtggggggaccctcagaatgttcccgcccacagaattgtggcaaggcagaaattcctctcttgtttcatttaatatgcatatttttacatagctaatctgaaatggaaacattttatctctacattcaaaactgcttttgttttatcagctgacattttacaactcattaatttataatgcaggtttaatgcctttgaatgttcctgggataaaaattaaagtgaccaagctagtttataaaggctcactatagtacgttggtaataattcttttataacagtgtgttgtacttaatagtgcattccatttggatgttttcagttggcatagtctctctctagtattaattcatattttcacatctgggtgatagataaatctcctcctgtattaaaatttagaagtttaagttcatgcactttgatgacatatgctcaaatttggaagaaaatctctgtttgaatctgtctttgccttgtaatgctcactagaccagattataaaatgagattgggccttgaatttgatcatgtgatcttggcccaccccaaagcagagagagttaacaaattaacaatgatgaaggaaagatgttcgtgatgaactttccccagaaaaaaaacaagagtcactgggaaggaaaaatccctgaaaataaaggagccacatcctgtcctgagtagcacatagtcagaaagcaagatgcttaggggtgggataggataacacctcaccagagttcagatggaaagtctaaggaagtcctaccacctctctacccagaaagaccaactaaggaagcaagccagggacctctgcttacagctccacccaaattaaatgacctccaagctctaaaacaataaggaaagcaaatgactcaaaattccaaagtccttctttaaactcaaggctgtatcatcagtggggacattttaaaattgaggctgcatgtctgggtcacatgtcagtagcaaacaagagagcactcttgtctgactctgccttgaagctaccttttcaatgacaaccaaggcgtggcactacccctaagtagtggttggtagatggctgcacctccttatagcttctccacattgcaagcaaaggaaaacaccagggaggtagtctatctttgttacagcagtggttctaacagttgcatcaccctgcatttccatattagtgtgtcatgcttcacgaaatgccatcacgtgcacaattttctagactcccgtgacaatctcggaagcagggaacccattatcattatttttacccatttgaacgaagtttccttgggtgatagaccaaggccacacagctggttacatgttggtgctgggacaagaaggcaagtcgcaagctcgtaattctgtgaactgcctctttatttccattgtttccaaactactgcaggaaacaagggtgtattgttagattctggtaattgatcaaattggtaggcttctataactcaaattaaggggatccatgaaagtaacaatcatcaaaacaatttaaaattaagcatctccatcttactgcacaaaaatccccccaaaatcccagggatttccattcttttacttgtgtagtttaaatttagattgcattctttgctggaaagttgtattattatgcattttttgagtagctattatttttgtgaagatttgctttcttgctggggcattgccaccaaatgatcatgtggcctttgcctggtcatttggcctcagtctgcctgtgttaccttctttgttacaagtcactagctgaccttggtgtccctctagcacagttttgggcttctgtttctctaggtaacttgactgtagacttcgtaaagtgatcagtgcacctccttgtattttcctaggtttattgtattgtaggtatttaataaatgtttgatgatggcattgaagatcctattggtacacttaacttgagcgatttataggaaatcactgttgaccgccttattaacaattagctgtctataatgtgcatatgtaattttcctttacatcaataaaacttctgctcctgctgtagatgaagtactgtcccttctcatcagttctttcgaatgttaatacattagctactgataccttatttgtaccgtaactgacagaataatggagagaaagaatctaagtaggagaaggggttagttaggtaacattgtatagggcatcttcaaaacaatagtcctgctgtttcaaatgtcaagctaattatcagcaatgtttaaatgctataataggccatttttgcaaatgttgaaattttccagcaggtatagacattataaaaatgtcacattttgctactgttcttttacatgtcacaggaatacaaaactctgaaaataaaagttatagctgtgaaaaataaagagaagccattacttattttgcttatgactataaaattaattgtcacgttgatacaatttagagtactgtgtacttgggagaaaggagagagaggatttaatagaatctggcaaggtgaaaataatgcttattatagatcaactatgcaaccttttaaatacaggtttttagtaatgcgtattcagatacatctttccgagactgtttgctataaagcaaatttaagcatcattttataccctttggtaaccccacatcacacatacagttctagagcaaatgaaactttaatatgattctacataaaatagtaagccatgccaataattcacatgcacttcatatgcaaatagttttgtcttatccatcaattatcatgtaaacatggtatcacatggcaaacctccctataatactgtacagtacctgtatataattatgagcgaattttgccaatgcgacagtttcacagaattgtaattaattcctctgaagattactgtgagagttttggatactgatgctgtttttggacatttattactgctctttagttggctttttgctgtgcctcagagacagatgtaaaattagtgtctattttgagccagcaaacagtacatcttccttcttgttcattgaattgcagagaggaattctttggactcccacttctttgtgtcttttgaagtaattgttttgtgctagcatgtagcatcaaaacatgtagaaaattgttttgtttatgctcagggtgatatatatgaccccatacaataaccaaccagacttttctaaagtctatggaaggatctacatgcttaagtttttaaaatagtttgcagtgtaagttcaacaaacaggtactctttaatatattctgcccagtgtccttcattcaaaacctggactagttatttcagtaaatgcctttaatctaagaagacataggcaggcagatctctgtgagttcaagatcaaccttgtctacatagtaaactccaggccagccaaggctacatagtgaaactttgtctttaaaaagatgtatatggttagaaaatatattgttagttattatataaaattaaagctcttatttatagataaggtttaatagaagtggggctaagtccaccatatactagcctttctataggaaaaaaagtttcgttttattttgttttgttttgttttgttttgttttgttttgttttgttttgtatttgatgaaaattgttcccaaactttctctgagaaaaaaaaatctaacttgagggaaaaatctaagaactcaaaagaggggataagatggagagcctgggtgcaatcagtgactttaattgtaatcatcggtgcatcaatccaaaagaacagaaagaaagaatctcatttaaattctaaagtaagaactaagtttgctatgaattactttacctggattaaccaaaaaagaggaggggggtaacacaatggcttatgggcatgactatcctactttgcccagccctggaaaagatggcgtactgcttctgtaagtggacttgacagcagttatttatttagtttaaaagtatttactagtatttgtgagtggaaaccctaaaggttgtgcagctttgttggcctgtgaaggtgatggatgctgcgctcctgaccctatatggtgagacatgacttcattgcttgtttagattgttctgatatttgggactccttaagggctgttcataaatcatctctctctctctctctctctctctctctctctctctctctctctctgtgcagaaaatatttcaattgtagtgctgcaggaacactcacacgtcacatgggatattgtagcccatgcagaaaaggaccttaaaaggcctggggggttttgcaggataaaggccttttaatgcctgtccagccttagataattttattctctccttactggacctttctttattcctnnnnnnnnnnnnnnnnnnnnnnnnnnnnnnnnnnnnnnnnnnnnnnnnnnnnnnnnnnnnnnnnnnnnnnnnncacactctacccccactcagtgttcagaaaatttgtaaagaatcttctgctcgttgctaagaaatggttaaatctcagtcaccagggggaaaaaagagcggcacattattgattgtcctaaggtatatgtgggccacacagctagagcagagacgttggaatatctctctttttgtagatctgagagcattgcccagcctgaacttgcctaagcccttgtggtcacacctcttgaaaaggttttgtttcccccgtcaattggtattcaaaccaggtcagcagattctgtttgcccggctctactgccgttttcattttaatttgcacctgttgtgcagttgttcggaaggcaagtgcagacccgcggattatacaaagatcatattatgagcagatatgcacggtgtaatctttttgtccccagcctcacatgacaaaaaaaaatctctctctttttgttccttttttactccctgggaacctgtcaaagcaaacagatatgactgactaaaatttgtaactagacatgtttccagaattcgccaaaagcattatgaacctgacacacaatccttttcattttttttccctccttttccgccacttttgtataatccgatagctggcgagagccacttgagatagctcagttgataacttagcgcaggattgctttattaggctcagagaaatcaaaatgaacctgaaaattgtttgcgctttttttccactgcctccccccctccccgtctctctctccctctctctttctctctccctcttgttcccatgatgtcatggttctgacttgtttttgtgtgtgtgtgtgtgtgtgtgtgtttctggagagttgggttaacagttcttggcaatcctgtgtgtgcgtaacggctggtgtgtttctctagctgagctaatgccccgtgtttattactctaatctttcttgtctggtggtaaagtggacaatttatgtactagcatgtaggccgagagcctgtgagggctgactaattcagaaacagccaccttcaattgagttcacagaccttatttacaggctgtctattttaagaaaagctactgagcgttgtagggactgcaggctgcagaagcagcccgcccgctcttgtgaattattttagcatttgtgttggtcttgcccgtgtcactttgaaatcttctgtaattatgacactatgaagacatctcaatagtagtattaatggcccagaagatatggcttttcctcattttctgcttaaaagatgaggacataaatgaccttagctcatgacggttgaaatagaagaaagactgagcatttcagactgtactggtttgtgtatgtgtctgtgtattgggcaaatagatggagagaaagagagagagagagagacagagagagagacagagagagagagagagagagaactgtttctaggaacaaaactacagttaaattactgaagtcatcttgtatttatagtacaaccttatatagtaaacacgtcatgtcactgagctaataaaactgtcaactgtagatctattttataagtttttgtgaagtgtggaaagtccaaactgcactatgtcttattatgtgtgcaatataagcagaatttaagcatgtgtacctctgttgcctttaaaattttccatcgttttcagcaaaatattgaaaataaaaagagtacacagctataatagaaataagaatacaaatgctatgcattggggatattgatcatgttttcctgacatggttgagtaattcagttacgaaaatattaattattttctattcacctgaatatgtgggggcactggtattttcaaagcagcattttgaatgtgcctgtgcatctcttcccacagtggtgaactatgacaacgtagtggacgcaggctcggagacagatgaagaggacaagcttcacattgctgaagatgatagccttgcaaaccctctggaccaggacaccagcccagctagcatgcccaaccatgagtcctccccacacatgagccaagggctgctaccaagagaggaagaagaggaggagctaagggagagtgttgtggagcacagctggcacagtggcgagattctgcaagcctctgtagccggtccaggtaagtgtctgtctgtctgccactgtgtggccccttcctgggccacctgcatgtcacctgtgcttcccagcagaacacctgcagccacatcattcaaatagttctttccatcgcccttctggagtagagagcagagctgttggcagatgatgaagtgatagcaatgtggtcacatcacgcacagtactcggattttaggaaatgattgtgtattggtttcaacccaagttggatatcaactctagtgtaacaaacacaaaacatgaagtacttgtacattttcaatgtgaaacattacagaacgcaatcaagatctctactctcatgacagaaagtataaagaaatacaaaggcttctctctctctctctctctctctctcccccccctgtgtgtgtgtgtgtgcgcgcgtgcgggcatgcacgtgtgttttgtgtgggaattgtgttatttcaaaccacataaaactgtcagttcggtgtacttcatgtctgacaccttctattggaattccttttaattctattgtaattccatctaatcattctttttttgttaagtgtgaatgtgatttcacagttttacctggtcaggtagctttcttactatttaacagttaagtactcgataatgattcttactgtttgatggtcatcttaagggaagttaaaaaacaaaacaaaacaaaacaaaacaaaacaaaacaaaacaaaacaaaacaaaacaaaacaaaaaaaacccaaccaaacaaacaaacaaaaagaccggtccagtgccaactgtgatagaagtaaaacagatcagtttcaatctgaaacttccgatgtcactgcacaaatggaaatgcctgagcctgaaattcccctggagtggaagacagggcatgctaacgaaaatccaagggcctgcctcggaagcttaagtggcctgtgagaagttttttaaaagtcccctctaattcagactttgtgtctccttcacctctattctatgacctaataagaattaccgttatgtagcccaccttggttttgcgttgacaatataaataactactgtttttgtttgtgtgtgtgtttgtttgtttgtttgtttgattgattaatgtgtgtagcgggccagacagagtttaactttacctctctgttattgtggtgttgcaggcgagcaaacactgtacagaagcagagcaattgtttgctgtgtgggaaggataataaaatcaggtctactggtaaagaaaattaagtgtgtgtgtgtgtgtgtgtgtgtgtgctcgcgagtgtgtatgtatgtgcgtgcgtgtgcgtgtgcgtgtgcgtgtgtgtgtgtaggggaagactaatggcagtttgactgtggtgtatttgtttctcatttccctaatacaccgtgccaagtttggtattctttctgtttccaattttgctttcggtgaaggtttctcgaatctcagcaatcccacacataaacatttatcgttacatccattaagacttaaggttttagattttcaactatgagggagaactcagccaaagatgcttgaaagataaatacgtttaattaggggcagaggatgatcattaaaggaagtctgactgctgcagaagtcattaacaatcttaaatgaaatttttatttttatgatagccatttacatgtataataagagccaatgattcttgggagcagtgtgacagaaacagagtgtggcgagaactcatgtaagacatactatttaaatgagctggtgttagctattcatatttgttaatgaactagatatgcagggctataagaacaaatgttcggatgctttaaattttaatatccagaaatcaagggtaaggaccaattaccagaattttcacccttaaaggaataattaataacaatataataaatgtacagcctcaaacttctttttaaaaagtttaattaaaaaaagaaagaaagagagagagaaagaaagagagagagaaagaaagagagagagaaagagagagggggaaagaaaggaagaaagaaagaaagatagaaagaaagaaagaaagaaagaaaggaaggaaggaaggaaggaaggaaggaaggaagaaagaaagaaagaaagaaagaaagaaagaaagaaagaaagaaagaaagaaagaagtcgatagtcgagaaacagccaaaacagcactgtcaggctatagtagtttgtgactgtagcagtttttttgtgtgttggtcatggatcataatctcaagcatctcaatgtacaatgatccatacgaatcccttacacagcctgctgtcacctggagttaatggagacagtgatgtaaatgctcttacctttatagtaaataaacaagcattctggagtccaaataatgaaataaaatgtaaatcctaatctctttaggacaagaaagtgacccagctattacctgtctcgttctgatgattagtgatgatttactgttctcttttttattattgttctaaaagcgctctgatgtggtgcctagatgtctaatgaaaagaaattagtcttaaaaagctcctcattgtttatcctgacttgtagataacacatttttcttctgataaaatatttttcttatttattgttcaaaacacacactatagacaataactctaattctggtgtgttttatttaggagtgttttctccccggtgcctggctgtctgcagtcctacctcggcacatagctttcccctgagataagctcctctcctttgctctttctcccctcgctctgtagtttgtctgcaggatgcaggtttttgcactgaagagtgaggcagagttcttactgtgcctttccggtcctagcacaatcaaagttttgtgtttggagctgtccttgacattctttcgtcccacaatggggtggacacagtgtgctggaaaccatgacatcattatcatggacacagacttaaataagtcacctgcatctcagcctctttctgcttattcaaggattcttcatcctacagaaggaagtgttctttatttttacaaatgcaccctttagccccaagggtgactggaaagtgcaaacttttacaagtgtttgaaaaataaatatactatgtggttttagacaccgtaatgctgagtcagaggtgtcttgaaaaaggttaagcatgaggaaggcggccagtgaggcttgccaggaattgaggggaggcattcctaaagtgctatcattatgtcctcttggatatggattcacatggaccctaacacctgagaaggctcagtgactcatctaactagaatgagcttaatattccaaaacaaaaatggccgggctcagcaagtcagctggggtaaagacattgcaggtaaaagtggcaccaacatctctaaacagtgtgcaatctttgggaaaagcgggttatagctagacaatgcacaaagggcctactattcggctgtgcaaatgacatttatgaatttgggaaacagccaactattgtaacttctcttacctttttataagaaaatgactatgaggaaggatgtccagcagaaatagccaatactaccaccattatttaaagaagtaaaatataaataaataaaaatagctgttaaccgttttcccttcggtgactcagtgttctctcagatggaaatcttatgattcttgtgactcttggttaccggaagtcatgtgagagagaggtgtgagggcgagaggcccagaggctatatttatatctagtactgaatgcagacatacctattttgtttcttttggggaccaataaaaataccaaaaagagcttcccaaaacattgactattacatttgacaacacaccgttcctgtgtattgaacttccaaatgtttcatgcaaaatatccctgtgaaaatattcctggaataaaggaggtgcctaaggtcaggagttaatttgaagtgggtgcacagtctaaataaatattattaaaattatgtgactgttttgaaaatggcattacattactctctctctctctctctctctctctctctctctctctctctctctctctgtgtgtgtgtgtgtgtgtgtgtgtgtgtgtgtgtgtatctgataggaatgtgctctttcagctttgattctatatacagatagattcaattttgctataacgttttctagccactgtttttccaccaaccacagcagtgtattatgtgataaacaaaaaaatgatcaggatacatctgagaaagagttcgactcacagttcctggtgttctaagtaaaaggattacagtacagaaatcctcgcctcggatcatggtctgctctcattagtattgtactgtacagctacagtttctgagagtccatgttatgtttgtttatttgaaatatttttaactggcaggctgccttgctctgccttcccacatactctataatatagtacacagagaaaattcccatttttctcccttatttgagagtattaccattttcaaaaatggcccttaatcattcatgaatttccaccttcaacattacatattttcatcttaattaaaacattgagctactgttttctctctattttttcatcaggaaatgaatatgattgcctgtggaggcataaatgctcaaaacaaaaagctatttatagaaatggggaggtatgagaaatagactttagaaatttatgtaaaacagtcaatggttatttttaatacatctgagatgttagtttgtaaaatctaagtattccaagttatgatatgcagaattgggattttcttttctttttttctttttcgagacagggtttctctgtgtagccctggctgtcctagaacttactctatagaccaggctggcctcgaactcagaaatctgcctgcctctgcctcccaagtgctgggattaaaggcgtacactaccactgcccagcagaattgggggttttcttaaaaggataccagcctatactaactccatcatagctataccaagcagaaagaacatgaaagcaaaatgagatattctggcttgccatgaagcacccagagacagcagctactgtgtctcttcataagttcaaatacttcgtcacttttgactcaatcttattgaaaaaaataacatctcccccctgtttgtcactagaactgccaccagaagaaaagcccttcgtttgcttcaaataagcacctctgtttttcacagcttgcagtaacgcttaaagtaaataagttcttgtgcagcctgcactgttgaattcattcagatgcctgaacaaagcttttgtttagagttttacaacaagcctcactgtttcccttcaaagactcctccttgttcctatgtttggcatgcttagaatagtaagcctttctgtaattttcaaatgctaaagataattttcccccacagaagaaatgaaggaagattatgatgcaatggggccagaagccacgatccagaccacaattaacaatggtacaggtaagttacgttcacatagcaacatcatgtttgttctgtgtcatgtggttttcctgaatctgataaaacacagacacatccatttgcacctccatgattaacaagaagttagacttcacaggtctagttttgtttcaattttgaatttgccatatctcttattttattaagcaactttgtcttccattcttataccctaactcgcctctatagctcgggaattttgagttttatgaatggacattcttacagcatgatttgtatggctttctagttttagcttttactttaaacataatttttatatcataatataatatgctggccttagctactacttgatatctgtcattgagaattcaagtgatatgatgaagtacaaattgaaaagtacctttcccaaatccacatttccataaattccttaaaaaattttatcacttaacttctctcagattctctcttcacttttaaatctctgcgtctactagaggtatcaagtaatatttctcagacagacttttaaacaagaattaaataaaactgatgaataaccactcaggacacagtaggcagtgttttccttggctctgctgtggctggttaagggtggcattccatgttcgcccccaaacagcatctcttctcacagcacaaggtgacatagattcactctgtgtgtatccttttctgtatggcactaccttcatgtttcaaacaatcctccacaccattgtaacaccattacaaatgttagcacagtccccaatacaaagtcattccctaaaataagacaagaacaaaaatcacataactgtctccattcagcgtgccaatgaaaaaagtgtgcactttaaaatggcttcagaagtatatttaattaagatgacattcacatttcccttaagtcgatatgcatcataatatactgttcatgctgtctataaatatgtttattaactacttaagagatatgggttcactgtcttgggtataaagtaagtgaaacaattttctaaaaactcctgacttactcatttgagtaatgtcaaattgagtacaaaactaaaagtatacaaccatatgggcttagagaaactgtggactagagcactgataattctaatttctagatgcagcttcaacaatacctagattacaaccttaggcaaatcaattagtctcttgggaactcagtttctatatctgtaaaatgcatatgttgagctagctgactgctcagaatgcttctagttttaatattctatgttgctgggatactgtttctataaaaatagaaacaaaagcgaaatgattttgtttaaaatataacaatgtaccctaaattaaggactctccaaaacctcccagtttgtgagcttcaagatggcctcaggttcccttgaagaaaaatgtctcagcttcaagcaagcattcataaaagctgattcatttccttcctgatcactgacagtgtgataaagtgacaatttagcatccattgtatatacctgagtctaacatgaggttaacaaaaagtactcaggtccaggaggtttgcaaatcaattttgaacaccctttcaccaggctttaagatcccctgtctcctaatactcagtgattcttagacttcatatgcatgcagtcaataaagaaatcaatacatagtcattgagtgttttcaatatagtccctgttgtgtgcatgtgacggagatgatggccaggaagactaagtcataattattatttaatttgggagagatgcccaatttacatgaaaagatgataaacagtaagtgaaaatatgtgataaatcaaatgggaggagtcataattatttgaattacagagattgacaagatcctgcagagtgggaatctgtctaggttttatgaaggaagttgaatttgaactaagtacattttcagtagtctggaaggaagaagtggaatatataaggtaaagagaaaacatagtatctaagtagaagataatgggcaaaagatataaattaaagggaatttatgcgaaataaagttataaaccgaagacaactgttagagaatataaagaaagcataagaagaaagaagttgggtcatgttgtaccaccatgatgtcttgggaaaatcaaactatagccgtgtagtcataaagccatgaagtgatttttaaaaaaagtttgtcataggcggaagtggggaattttcaacaagacttagtaggctggtctttaactcatagagatgcacttgccttatcttcaccaggactgggatcaaaggtgtgcggtcaggcctggccaacccagcatttttacacaggttctggggatcaaactcaggtccctgcttgcatgataagcactttactgactgagccagatctgcagccattgacgagacaattttgaaaacctttgatgtcctagaacatcccacatcaatttgaacatctctgcccattgttctgctgtagcatttgaggctcaagtaatgaaagcaagtttggaaggctcctagaaactacccgcatctacccagtgagtctcctcacctcatctttaactagcatccttaaattaattatagaagaggaaggtttaatattattcatatataataatgataaagctgtcaaatatttctttgttatttcataactgattaccatcaggattcatttttttttcttcagcttggatagccatcaataaacaaacactcttttctttcagtattcatcttaagcagacagaatttaaaccgatgcttgagggagggcaaactttaaagaaatggaatatttaatatgtgcccttaagaaacataaaattttatagggcaatggggaggtcaagtcataataacagaaagacaacatttgcaaataaataattgtttcttcattagctctgcaggccagtcatcatttattgagaccctactaagtgtagaagtattttgttcagctatgagcacagagcaatcagacaagtaaaagaaaaggcacagggatgagaaatatgtgccaaatatttaacacaacattgactgatatttattcattgctaaccagtgttataatttttactgctagtaatgtacgtatgtgttacattgtttcatttcaagtacagcaagctacgtaggtccaaaggcaaagtgtatactgcagagtttcttgacagagaaccgggatcatatgttagagctagagccatagacggatgcctgaagatttccaggcaagttcttcaggagaacagcttcatgagcatgcctgtgtgcaaagagaataatggaaaggctggacacacaaacgagaggaggctgaggaggctcttaaaagagcacgatggcaacagtggtagcagttgtttttgtctcagtagtgtgatctgagagaaaaaatgatacttgaaacgaattaaccaaatttaaggtgtaccggggaactctctcatatagcttatactcttgaagtggacaggaaaaaaaaaagagcttcagttactagcaaataagtaggagtatggatgaaatctcaagtagaaatggagagtaattgctctggacagcgtatacagtcagtcatcaagaaagaatattctgttttgaaaacatagcctgagattaagcatataaatatttaagtctctttccatatgtttggtactgtattagacacatagataggacaggaatacctcttagtgtgctaaggtaagagtggagtaagaatgaaaagacacatttcaaggtgaactaaggcaagtgcccagagcagacgggggatctgtctgcgcctggttatcagtgaagtgcctgcttaaggaatgaggaactcaatgatgaggatgggggatgagagcacgcatgttcctggttctggttccgacagattgaactgcctggagcttagggaagtaccaagactgaggggacaattaggcaccaactacttactacctgtttgttggcttgtttgttagtttgatttttttgagcagggtctcaatatgtggctctggctctcctggaactcactgtgtagaacggactgaccttgaactcacagagatctgagtacttctgcctcctgagtgctgggattaaaggtgtacactaacttgcctggaaggactactaccttttagccaagggcagcctggacaaaatttagtcctaggacataagtcattttacttgatctatatagatagtgcactaaaacatgctgcatagaaagataactttagacttcggaacattatagttatagccaggcatggcagaacacttctctaactctagcatttgcgagccaaaggatggtgagtctgaggccagcctgtgctacacaatgagcacaaggttctgtctgaaagaaacaaacaaaatgcttcagaaactttatagagtggagactctgagggtagatactaagtttgtttttctccatagtcccctcaacatgcgcagtactttatgtagtgctggtggttgataagcaggtcatatcttgagttagagaatgaattaatgatgaatgagcttgtaaaacagggaacagtgatttggatcagcagtgtgaattaagaagtagtttgacccagcctttttgctctgtgtttcaagaaagatgcaagcaggcagggctctgagggagaagcctatgagggatgggggattaccgagggctgacacaatttcatttaatccgaagaagtggagctcgtgtaggaggatgtcattaagcatgtgggggggaaaacaagtagtttgtgaaataagaaagcaaaacgaagcgtgaatgaagttcctttttggtctcttactctatattcagtttaagacatattttctttactatgcactcagactattaaaataatcgttcataataatgtatctttgcaagatgcttccaagagctataatttattgagtacatttaaaacttgattaaaaataagaaatactgaaatagggaaaatacagtccttatatattaaatagaaaggttaagcatctctaggacagaatctgaaaaaattcttcttttaccccattatcctggtttggtttctgttgctatgatacgcaacacaactaaaagcaagttggaggagagatatttgtttggcttacaggtcatagtccatcactgagagaagccaaggcaaccaaggcaggagcttgaagcataaaccaacagaggaatgttgtttgccagcttggtttcaggctcatattcaacttgctttcttaatacagcccaagctctcttgtctggggatggtgctgcccatggtgggctgggccatcctaacaggagttagtgatttagtaaatgccccacaaacatgcccgcagatcaacctgatgaaggcaatcaatccttcaactgagatttcttcttcccatgtgtgtcatgttgacaaccaaccaaagttagccatgatgacatgcagttactcaatctggataaccatagaaacagaagaaaaaggaaagaggggcagggcaaggaaagaatgaaaagatataagatttatgcaagtagggacactttcagcaaataagtaaattttaatttacaaaataaatctacagacataaagaggagtcatttaatatcatatgccactaaagctggcattttaattggcttttttaatactaactttatagtgtaataatgtggcatttagaattattcatgtccttgtgatctttttcagcatctaggtccttttcaaatgttattaaatcaagcatgataaacagcaactacagagatggagtctctctcttatgttgaatcactgtgatgtagttgaaagagcaatgggccaggagtccagaaacgtgatgtctggctccaggtcttctagaaacttcttttgtaactgtgtgaatcgttagcctcactacatcttgggggcatcagcttcttaaatgagaaaattaggctagaaattttgggcttcccaattctcatcctttctcctcatgaaattgccttgggaaacacaatttaagaaaataaaaactgtcatgatacatgggaatggaagtcctgtaagggccctgctctcttctgctctccctacgcagtgaacctcgccttgtaattggtccctaagctgccctgtctttggcttttcattcttgatcattttaagaactacaaacaaggtactctacaagtttcatatcccacccctccccgctcccagccctacaattcatctcttgatgtcatttcacagaacgcaaacagcagagtgtaactgtaggatgaatactacagaatcatataagggatttatactccccctaaaataacagttcagtccataaaataacaagaccagtgttctcatagcaaatgaaccctcaataataatccagaccaacagtggaaatctcatctgagccaacaacacagtagtttgactcctctgactgggttaagataaggcttattttctttgtggtttagcagccccaacatcctcttagttctcctacaatggatcttaattaaaggtttgaagttttctttttagcattttttttaaggttggaggccatgcaagtttgaacatcaggtatctcccagcataagatgagagactgtgacgtattagcaaacatacaggagtggagaattcagttagtacccaagttcccaaaaggaggacacacactactctactatcttgctacttactgtgaagcaagtctctagtttgactctgtcctgtttttcaaggctggggagattttgtcattcagccatacaattcatacaattcagccatacatctgtcatacaaatcatgagtttggggtgtgtgtgtgtgtgtgtgtgtgtgtgtgtgtgtgtgtgtgtgtgtgtgtgtgtgtgtgtttaaagtaaatctcctattttaaaaaaaatcaatgacaaaaaaaaaaaaagttgagaggagaaggagcgctggacaggacggacaggaattgtcagggataacccatcacaggtgtgcacctggaagagtgccttcacttcctggctcattagtgctggggttttattagcttcatctgcaattaggagcagccatctctactgcacagcaagagttcccacaagaaataacgaccactcctagcctcttcttgcatgcctccttcactcatttcaacaaatatttaataagcactgttctccttgcgatgccgcctgtggtttccaggcatctccaaaatattttttcttaatcgctgtgtgtggttctcccaccagaaatctgtgttattttgactttttaattgaaaagaatacagatgaaactctctagacttacctagggaatagacaacaaattgattatggcaattaattcaaagtatggattgtggttactttaaggatacccaaggaggtacatgttagttcatttcacaggtgagaaaattacgaaccaaacccaaaataagtggtccaaatggggagtcccaggctctgagtttgatattatctttcaattatccagaactagatgtgttctagacttcccagtaagtactggagacacatggcccacacctctgacagttcatatatgtggaagagaaagatgaaatgtgctatgaaccattcaagggttcacatgtgcagatggtagccagcaagcaaagcagaagagtgcaaactcagacttaagtgctcaggaggcagcccgatgtgaagtgatcccgtgaaattactcagaaccaagctgtgtgcagtatgagacagaaaagagagtcctaccagtagagattcttaagtcagacaagattttctctatggcctgttaaaacacagactgctgattctgtagtgggccctgagaacttgcatttcaaataagttcccaagtatattgacaccaccgatatgcaaaccaaaccttgaaaaccaatgactatccaaggcaaacactggctgttttatggctttctatgaaaagaaagtatgaactgctgagcaaagtcactgtcctaaagacagcaatgctaattccagatagttagattacatggttaagggaaagatgaacacatcttgtttagctagggaattaaaagtcaatacgctgcatcattttgtactgccgcacagcaaagtcattcaaaggttactgtaagcctctgggtcttgatgttcacaatcctctcatacaaaatcaaactttaaaattagatggcatcctggactgggctacttcctgctgtggagagaaatatttgatcttgcagactgctacaaattcccacctcccattcatttagcatgaatctctcactggtatttgaacatgccccctcagaaaaggccatataagagcaggggtggagagaccaccaagatgtctaattctctgcaagagaagaaacttctctgttgctcttgacgacccttctctggcctgatacatgcctctgtaccagtcggaggctctgagaagctgctgtgtgtctgtgccttgagaaaaagatcatccccttccccatttttgccaatatatgtatggtgatacttaattattagccaactttatacagagtagtgaaaattcatatacctttgcataagcttctttaaactaaaaaaaatcaatgtaaaattaaatattgctctgtcttcttttcatcaactagtattaaaggtgttgttttttcccaagggtgaagacggttatgcttgacacgtgactactgcttctcttccctttgccttgacatagcaatgtgaataaaagctagatttttttccaaaagacttacttatttatgttaatgtttgccaaagtggcttagtaataatattaaaatatatctcttcagtttttaatgaaaattgaaaacatgccagattttaaattagtggtaacagagaagctgctttcttgttctaaatacagaaaataaatggcaaaaggaaacaagaaaaaaagaaaaaagaatcagcttcggggtcacattataaactcgacggcctgtaaagtataagtaaaaatcacttttagtggtgttattgagaacatgttctaagcaactcaattatgggaactgactgattcctgagccagtcagtggtccttttctgctgaccctgcttgtttttaggacaattactttaaaagtcagtttagactaacattcgttatctaccttaaaaaaaaaaaagtcaatattttcccaagacagtcttaaaggtatttatgaaagtatcattaataagcacgactagtaagactgactaacatatttaaaagaaaagagagcctttgatgacttgaagggatctagaaatttatctaccaatattaaaacacatatagccatgaggaaacatttttaattaacattctctttttggatggagaaaagtttaactaacctcagggaaggttgagatatttgcacgacgttagggtaaattttaggagtaaatgcaaaatccccggagaagatatgggaagaaattacttgaggtttcttgtgaattttttgttatggtttgatgataaataccatgcaaatatcctctgtcagtgtgttttggcagtccttccaaggcagccagggagtgaagaggattatagaaggaacaaaaatgaggttgattttatactagaaaaacacagcggggaattctgtaacttcttagcaagctctccacctcagtcctgtgtccactacactgtactataaaatctttgggaaaacaaatatacaaacttccaaatacaatcaaaatttcatccttgccaacagaggtaaccaaaatgcacccttatcccttgctccagtactacaagcaagaagggttttggttttcagagactggaacatggcgcagttgagagtagaaaaggaagtttctggggcgtcatatataaggagaggtgagagtacagtcactagaagatgtagcccagcctcagaacacacagctggatgtgtggctggggaccatcttgtctaccttccccagcttccccccaaaccctccactcctaaatggaaaatatcagtcccttcactctgcatcttactgctgtagtcacctggcagtgggggaaccctgagcccggatgctcattttggaactaagtcctaaaatcatagggaagggatccatgggcttgcattgtctcttggcctgtcctggacaaattaatgattaggcttgtttcaagtgcaggtatgcaactgggaaaatgggagggggatcacactggacatagcacttacttgggtactgtaatgcttggtagtgtggacatgaagagctagatctaggcaaaggaaaattctaaaaaaaaaaaaaaaaaaaaacaaagagaaacttacattgcttttcatggtggatatgatggctcatttaagtttgtatgttagctcactctaagtggctgtgcatagatgatcgatagcagatccgcgcccacatgaatgatggaaagccctaatgaagccaatagacttaaatgattaaatgacatttcctcatgaagccccttttggatactcactgaagccatgtctaacttgtgtaagcatttatgaataccatgaaccactctgtcgcgttgtcttattacctgaactgacaattgaacaaaactctaaatccctcgcttaaccatcagataaccttgttttgttttgatggaaacatagtgttaaaggcacattattttccacatccacctcctcaatgtttcttccaaaactactcattccacggcaatatactcagtgttcaggatccacaggtgaccacagatgatccttaaacagaacatgtgacttgaagccctttcgccctcccctcacttcagttcacacagaaatctagcatggcgaagtctgatctagtaatcaaattcccttgccaaacaccagaagtgtatctagatgtagtttagtttgcctatccagaaaaatcagaatttttctcccttttaagcccaaagactattaatgcaaatccaattgaatttgcatttgattacatttctgatggaaacattcatatgcaaatgaaaattcatgcaaagatagccagataattcaaatagttgctgaaatatcaagataaaattaggatattaaatgtacatccatccacttttactgggttacactaaggtcatcaagtgggacaatattctgaaaagcctcgaataaattttttagaatattctaataggtatgtgttcagaagggagctgtaacattactttcagttgtcatagcacaaaaaaagatgtcagccactgttaaagttagtcatattgttttaaaacattcactttagctgggtggtattggtacacacctttaatcccagcactctggagccagagttaggcggacctctgagttcaaggccagcccagtctatagagtgagttccaggccagccaggactacacagagaaaccctcttacaaaaatgaaaaaccaaaactaaataaaaccatttattttacattttgttccttgccttctcctatcattaaaagcataataataataataatatttggtaagactattttaatgagccccaaaacgggcaaatagtttctgtaagctggtagttcccacacactccctaaggagtcaatggagcaatggagcaagttcagtgatgttatcattatcctttgaaagctcctatggccttgtgaaccgagcagctgagtcatgatcctaactgatggctagtaaatccaactaagaacagatataagcgaaagttcaaggtaaaaatgtattcatctagtaccttacattccaaactctttctaaaaggaaaccttggaattagacagctatccttgttaaacttagcagaaggtggagagagcaaaggaaaagacttgaggttacaacatgcagaattgttaccacctagtttggtggtccatgaaatataaagaaaattctcctgattgttcttctgtttgatctaatgtttgtacatgatttcaactctttagaattctagttttctctgcgttggcaaatatcactagccatttatcagactgaaagctacagatacagaagacacttcagcatgccactcgggcaagctggatctttccccaagtcttaagagattttactttgtaaatctctctcaattccagcaacttttttccgtctctaccaccgcttccttaatctttgtctcttcagggattttggagatgaacatgtccccagtcccaatcccactgtaccctcagccaactctgagcagaacctacccttccttttcttctgtccctgtcatactatagtcagagtcatcattaaaaagtacaagtgttttcattctgtaaaagtgtcatttttgcttaatatcctttgctagctgctgcttcttcttcttcttcttcttcttcttcttcttcttcttcttcttcttcttcttcttcttctccttctccttctccttctccttctccttctccttctccttctccttctccttctccttctccttctccttctccttctcnnnnnnnnnnnnnnnnnnnntcctcctcctcctcctcctcctcctcctccttctcctccttctcctccttctttttcttcctcctcttcctcctctctctcctcttcccccttcttcttggtcctaaaataaaaatgaaagaccttaggagggaaatttcccctccatgttcccacttctgcgatctgttccccaacatcctatatatttttttctttcactctgcactccaagttagataccaagatgtccctgttcctagtcacctgtgtacacactgctgctcctgctttgagagtacgttaattccaagttttcctcattaaagttttcctaatctttagagctcatttgattcctgtgttacctttgtttatgccacagtagagcaccaccaccataatacccagtcaaatcggaagcaatcagtttatttttgagattctgtcatttgaattactcttttctttctttctttctttctttctttctttcttcctttctttctttctttctttctctctctctctttctctctttctttctttctctctctctttctttctttctttctttctttctttcttcccctatcttcccctctctctctttctctctttctttctttcttccttcctttctttctttctttctttctttctttctttctttctttctttctttctttcttcccctatcttcccctctctctctctccctctctctctctctctctctctctctctctctctctctctctctctggtggtttcctgaaggataaggttagcgttggtcttcacttaggaaaataagacttgctgtttaggctttcaatcatcacatgttaaacaagtgggagcttcgattttttttctaatcttcttatctaaaatccacaagtttataatagtgtgaaccaaaggaaaaatggggaagaaaaagaaaattcactaacttgcttgaacattatcacatcataaacttgccaaggatatttcttataggaaaccctgcatgcttcttgtagcaaagaaaatatggtaaagatctagtggcatcagagggcactgctttcaagccacagtagcgtgagtcggccaggcactgtgcaaggccctttccccagcacccataaagaggaactaacagttactctttcagtcctacattatgtataatcttttatttgggatatgtaagccataacaaatttcagagatgtatctagagattttaagtacatcatgtcttgtgacacagattgttggaattggtccacgacaattatttcataaaaataatcgcaacttaagaagctaacatcatatagaaatcatgctgctgttttatcagtggggctccattactttatattttattttttatcagttatgagcttagttttattttaactatacaattctgagcaaggatcaacattgcagtgagagaaagagagagaatgtgagttgttagccaagtcacacttgtgcttgtagagataggtgtctctccctccattcacatctgtctcagactctgcagactttactctcttagaaaaacatagcaaaagcttttatttagcagcagatgcatcggtagagagggaggtgaagtttagtctggcttctcaagaaaattaaatttcctttttttgtgtgtttcagaacattgtattcaagggcttgtggaagggctggagaggcctacactatctactcctcagaggagatggtcaaggtttccctgtcactaaaagctaaatgcacttttcttaagacaaaaaagaagtttaatatagaccattaaagtatctgcaatgttatgttaggccatgtttaggaaattttttttaattcgattttaacattttttaacaaatacaatttaaattttctttcatttgtacatgaattatacagacggacattttaaaaaccaaatttgcctacttaaaaaaagtaagctcttttacctgtattgtaaaaacaagcatttaatcagtgtttggtcatcttctcttctgactaatgagctactttaagtcttactagtaacaagccaacctttgctaccaacaatgatctagcagacttggtcacctaggaagaagaccctgaaaagacctttctctcttgcttatgatttcagttaagaatgcaaattgcacatcagactttgaggaatactttgccaaaagaaaactggaggaaagagatggccacgcagtgagcatcgaagagtaccttcagcgaagcgacacggccattatttacccagaagcccctgaggagctgtctcgccttggcacgccagaggccaacgggcaagaagaaaatggtaaggctgtaattcatttttagccgcgatactgacctctgcagctgttagaattacaaatgcactacatgcctgggtgtttaccttaaaatttgaagaacagctgcagaggcatggaatttcatgagcaaagattagaactgtaattttagggtattgtgaaatttttttttgtcagcaaatttgtgtcatttgtacatccaatacagaataagaacaattacagcccatttctaagagataaaaatatctaaatgtattccaatctttcagagatattttacttttgaggaaaaaaaaaagtttaagatcaccgaccctcaccttttgttctctgacacctgaaaaaaaaaatctccttccctcctgtgaattcctgagttacatgtgagtctagggttcagggggactgtcagtcacccaaagggaatttcttcatttatcagctgtttaaattccccctccccacaaataagctcaagtaattaattaattttcgagcgcagtgtgagctgattcggacaagcctgccctgggtgttcaaggggtctggttgtgaggaggccggggcgcaatgatggcgctgtgcaggagcagattgcagcgattcctgtcatagcagcccgggcagccagcccattagctgccattgatttactgaccttttggcccgctcctctcccctcgcctctcggctacagacctgccacctggaactccagatgcttttgcccaactgctgacctgcccctactgcgaccgcggctacaagcgcttgacatcgctgaaggagcacatcaagtaccgccacgagaagaatgaagagaacttttcctgccctctttgtagctacacgttcgcctaccgcacccagctcgagaggcatatggtgacgcacaagccagggacagatcaggtgggggttggttctaagtgatttctttctataataaccccttagagaaacgatattgctttgattggcaatcattattaatttttcatggcattttgaagatgcagatcttttaatggtaatagctttaattgaggtctaaatgattttttgatggtctcttctaatatgatttaatagtcttatgttcacgatcgaatgagtgtgttaatttctaatttagaaattttatttgcactttaacttgactttagtttcatttttatgttccacaaaaagtgaatgaaattgtagcattttaattatacattattaaacatctcagcaattttaattccatttttcacctagttttgcttaggcatttttttttatataggacctaatacatagcaaaagaagtgcatatttctctcatttgtcacgaaacacttttaaattacttagaatactttacaagcttactaatttatgaaatatgtttttaaggagatagaaaggccatataagttatatgcatatacacataataaattggaaaagtgataaatgataaaaaacattggttataattaaaatgactccatctcaatatacatgcttgtagttaaatgccaaaattgttctgcctcttttagcctacttgttttaaaaataagaactctggcttggaaaggtaggaatagggtcttaaatccttgaaatgactgagtagggctaattcacagcatctcttaaatgtttcagcaaaactgctctttctatcctcctgggagaattgactgtgcaaattgatattatgatgtgttgggtggtcacagtaatggtgtttcataagtcacaataactggtcctacagatacagaattgcccctaaatgaactttgatattatatatttttgagatggttaaatatgacattctctataaaactccgatttgtcctcataggccttattgtctttgaataaggaaaagaagacacaaactcaattaagcaagaatggcaatactgtgttacaaatttttactatttaaggcactatatcacattatcacaccatttgtttctgattggacttgtgagttgaatgttttccaaagatcagctataagtaatacgcttgtgcagttacacttttgtaacagtttatcttctcatgcttctatgcacaaaaaaactctaggaaaaaaaaaaagcctagatatttatctagtataactgctttaaatttcacatgcagaagtgtgattgtgttggcgcattatgaatggtagctttggtgttgaaaagtcccctcatttgctcatggcatttacaattagtaaattaaaatgattgtatcatattaacagtggcacaactaaagtttatagtagtcctctgagggctgtgggggagacaaagcagctgttgctgtttgtttatgcaactcggcaacatatgagcactggtccctcaatggcgctcggcgggttgggctccgcttgatctttgaaggttgctgctgtttgaacaaacctccctgtgtcccatgtaacaccatctgtctcactaggaatgtgggaagattcagcacaccctagcagttgtcacaccgtttctgggctgtctttttgcaaaaggcttttgtgtcattgctgcagaaaaaggctggcctcctaccttgagcatccagagtggatgactgttgggttgttgtttttttttttcccccttagaatttcaagtcacactgcgtttcccccttgttcaaaaaggtcagcggtgttggatggtatctgtgctgcctctaacttgtcttttcagcaaacttttttttttctgttggttcttgcacactactaaaacggaaaatgaaatgtcattgaagtctttcctactgacttgtgataaagctgttcaagcagacataacccaagatgttgtctcttatttgataatgaatcaaatctgataggcagcacctaagaaaaacacagttaacatgggccagtagcacagtgaatgggatatttaaacaggcataccaaatatttatagtcaaagggttttttttttttttttgattttgtcttttatttgggggtggggagaggtctccatttctttaaatttcagtttgatttagtttacacttttacctggaaacagaaaacttcacaaaaatttgttttaagtgtgggttaaaagaaaagaacaattttataattttcaggaaagtatttttttcctcctcaagccagccgtgttttgaaaggaagcctttagggttcagattctgcactaaaccaaaaggagccatgagcatctctacaatcatactttctcatctcaagggtcaaagaaatgctgtagaaaaaagatgtcaggcgtaattgtgaagcaagggtccgacgtgcacgggaagcactttcttaaaagagaaaaattcccattttattaccagcattaccacttttattgcaactctgaaagtctgaccagataaataagcatgaactcagacctctcagcctgtctaaaaaagaggtcttgggaaagattcctaagcaagctcctttgtgcctcctgaacaaagatgacggccatttttctccttttacagcaccaaatgctaacccaaggagcaggtaaccgcaagttcaagtgcacggagtgtggcaaggccttcaagtacaagcaccacctgaaagaacacctgagaattcacagtggtgagtcacaggggggtcgctgcattgcattctttcctactagagaagattgtggagaccttttcagtgtacacagtcccgggtggagtgttgtgggcttacccctttatttcataagctctaggagtcttggagagtcttatggtatcctataaatgcttatccttcttacaattcacaagggctttgatttgtgttttctgctaaatctagagacttttacaaaaccgtataactttgacctggagatatttgggctgcaatttcagaaagatattcattttttttttgatacctaaacttacaagaaaaagtgggagaaaattggacaggaacttgcatatgctaaccatttcttgactcctgatagctatacatcataaacccacatcctaccgctgagatttctgctttatacatagtttgatagctctgccaagcattttattaccaaattggatgctattcaaagaactagttgaattggtagaatcaatggggtctccacagagttgattaaagccatggctacacttccctttaaatactgtgacatctttattgtgctattgaccacacattaatctgacactctgtttaaataggaggctgctgatggcctgacaagatttgggattctaactgaaaaaggcgtagagagcctttaccttccacagcttacatcttgaattatgtccactgggggtagataaaatccagagatagttatggtcatataactctgacgtaagcatctagaatgtagagtccacctacattcgacacctagattaatttcatttggtttcacagattcttatcttggcagacaactttgcatgttacctaaatgaagaaatctaatgctaattttaattatcctttcaggtgaaaaaccttacgaatgcccaaactgcaagaaacgcttctctcattctgggtcctacagttcacatatcagcagcaagaaatgtattggtttaatatcagtaaatggccgaatgagaaacaatatcaagacgggttcttcccctaattctgtttcttcttctcctactaactcagccattactcagttaaggaacaagttggaaaatggaaaaccacttagcatgtctgagcagacaggcttacttaagattaaaacagaaccactagacttcaatgactataaagttcttatggcaacacatgggtttagtggcagcagtccctttatgaacggtgggcttggagccaccagccctttaggtgtacacccatctgctcagagtccaatgcagcacttaggtgtagggatggaagcccctttacttggatttcccactatgaatagtaacttgagtgaggtacaaaaggttctacagattgtggacaatacggtttctaggcaaaagatggactgcaagacggaagacatttcaaagttgaaaggttatcacatgaaggatccatgttctcagccagaagaacaaggggtaacttctcccaatattccccctgtcggtcttccagtagtgagtcataacggtgccactaaaagtattattgactataccttagagaaagtcaatgaagccaaagcttgcctccagagcttgaccaccgactcaaggagacagatcagtaacataaagaaagagaagttgcgtactttgatagatttggtcactgatgataaaatgattgagaaccacagcatatccactccattttcatgccagttctgtaaagaaagcttcccgggccctattcccctgcatcagcatgaacgatacctgtgtaagagaatgaagagatcaaggcagnnnnnnnnnnnnnnnnnnnnatgaaaacatagtccccaacaaagctggagtttttgttgataataaagccctcctcttgtcatctgtactttccgagaaaggactgacaagccccatcaacccatacaaggaccacatgtctgtactgaaagcatactatgctatgaacatggagcccaactctgatgaactgctgaaaatctccattgctgtgggccttcctcaggaatttgtgaaggaatggtttgagcaaagaaaagtctaccagtattcgaattccaggtcaccatcactggaaaggacctccaagccgttagctcccaacagtaaccccaccacaaaagactctttgttacccaggtctcctgtaaaacctatggactccatcacatcgccatctatagcagaactccacaacagtgttacgagttgtgatcctcctctcaggctaacaaaatcttcccatttcaccaatattaaagcagttgataaactggaccactcgaggagtaatactccttctcctttaaatctttcctccacatcttctaaaaactcccacagtagctcgtacactccaaatagcttctcttccgaggagctgcaggctgagccgttggacctgtcattaccaaaacaaatgagagaacccaaaggtattatagccacaaagaacaaaacaaaagctactagcataaacttagaccacaacagtgtttcttcatcgtctgagaattcagatgagcctctgaatttgacttttatcaagaaagagttttcaaattctaataacctggacaataaaagcaacaaccctgtgttcggcatgaacccatttagtgccaagcctttatacacccctcttccaccacagagcgcatttccccctgccactttcatgccaccagtccagaccagcatccccgggctacgaccatacccaggactggatcagatgagcttcctaccgcatatggcctatacctacccaacgggagcagctacctttgctgatatgcagcaaaggaggaaataccagaggaaacaaggatttcaggtaatgagatgagtcactttgctctgaggaaaggcacataggataacctagttgtgattcccaggctgcccagtcctaaataaattgataaatgacctagaagatacaaaaggtgggggaaaaacactcagttggggtggggaaaccaggaatatgagagctttgaagcaagctagctaagccagtggctgaaaggataagcttattaaaaactaaggcaagaagattgctagtttaaggttaggcagcatagcaggatccggtctccaaaacaaacaaaacagaataaagaattctgagaattacgcatcgatgctagtagttggtcagcttaccgacatgcttgaaactgaagtgtgtaacagccacactctcagaaaggagtgtacgacttgaaggaattacatatttaaattttgatatctattttgttttataaagaagagttcattttgaagagaatttaaagaaatattttacatgttacataggacttcttgcctaattttcaaatggtcaaagaatttgtaggtggtagaatctgaaagcaggcattgttttggcattattttgtataatccctgtttgcaaaataggagccaaagtggcagtgcacggctgtaacagctgtccagtattccaatttacaacacatctgccctctttgtaaatgcatttaagcctatttaatcttctctagtattaattagtgcaaatatagtgtaagaaaactaaactgtgggctagcaaatggaaatgtatgttaccatgcaagtttgcactcctttggaccaagacaaaaataaatatcaagaaatttaataatttactgatccacattcattattgctcaatgctgaaggctgttttaacatagatagaacattgataaaaagtgttattaatattctctatttcaaattagaaaattaaatataaaaatatagcttaaggcttttagttggtagacatacatttaaatagattgtataataataatattttgtacctaaatataaaattcaattaaaatgaagcttctacagctaccaatcatttttgaagtaaagtacactggaaaatatggtaatcctgatatttaatgttcactcttgggttttctctggtattaaaaaaaagtgaaagatttaagaaaactgttttcccatctatggcagagaaggtttatgttttgttgaaaagtgaaacttccatgttgtttaggaaaaaaaaatgagaagattttagttataagatagattggcatctagcatttttgaggatctctagttgtcagcctatgcttaattgtttgatgtaaacacaaagaggagagaccatgttcaactatgtgattatatcacagggagacttgctggatggagcacaagactacatgtcaggcctagatgacatgacagactccgattcctgtctgtctcgaaagaagataaagaagacagaaagtggcatgtatgcatgtgacttatgtgacaagacattccagaaaagcagttcccttctgcgacataaatacgaacacacaggtatgagcgactttgactagctagctagagctctccggcctgctgtatatttcataatatttaatgagtgcacttgtgcgacataagatgtagcatatgctgacaccttcaacaagaaagaagtaatacttttgcataactcagtaggacttttgtgttgcctgtttattggatcattcatgtgtttatgagtgtgcttgtcttcttaactttcaagttatctgtaaaacaaatttgcctatcatgtcaaaggaaaatttaaaagcccagggtaatgaaatggcatgacaagagctcatttttgaaagtatcttcaaattcttaagctgtggtgaatatatatatgtgtaaaaattattatgataaatctggtccgtgatatactagtggactcatccaaacactaagtaagccatgctttggggtgactttctttggttttcataaattggccacttttgaaccagttataaatgttatttccataaaagaaaggcaagagaccaaataagccagtgaatcctataactgaaagactaaagtaatatatccagttcatgtgttatctattaatcaccaaccctgacaagacaacagccccagggctccctgggactacaggtggtatgttacgtttcctaaaagtgtaccgtgtaaagatactttccacaactccggatcagatctgcagctctgtagtagggtttccatcaacgtttcctttctccttcccatcttctgctctaaacaaagaaacctagtcttaccctgtccctaatccctgtccaagtcttctccattagaaatatgaatttgtctgtggtggggaaaagaaagtatagagtcatattcaaaatattgtaaatgggagcaggatggacaaagtgtagggaaaccttttattttaaacaagggcaaaagttagcattgatgcatgtggtgtggaagagaagaggaggtgttagatcttaactctctgcagatagggtacatcttaaagataccttgggaaactcgggtactccaaatcttcccagatccttcactagccatgggttggaggtagcacatgtgaccagaatcaagctgagcgctgggcgaaagtggcccatgctggaccgctagtgctgagagcactttgtgaagagaacccaggttgtaacagccttgctcctggtccaaccagttcagctcctttccctccaaccataatatctgtggttattattttaaaaggccaattaatgttaaaacaccccaaattggtttgcaaatctacacaatttttatacttaagctatatatttgaaacatcatttttttcctaccctgttcatttattatacttcctttaatactgagtcttatttaagtatttacagagtaacaaatattttcatgcctaaatttactttaattttaatcaacctcaaatatattttgtatttcattattcagctacaataggcacatcactgaaggcatctttccctctctgattggtcttattatatgaccatatgcaaactctatcatttactacatggtgagtgtaaaacttttattttagtgagggctctcatacatagtgacatccagtcagcatatttatctcctataaataagctagtccataaacttcatagatgtccagctagttgagagacccaaaagttgacaaatgcaaatgtatatatatatttattttttttaataaaagcacgttattttaaaagtaaaatatcttggtcctttaagatgagagatctgctacctagacacattgcctagcaacaggatgcgagtcattcaatggcttctctaaactggtgattagttatcctcctgttggtgacccagcttgtagagtttccagtctgttaactttttggtctcttgaccaaacatctcatgacattaatattgtcattgtattaggttccatccaagcaaaagtcttcatgaaatgtgtcagtatgatgtatatgtaaacttagcttgctttcttctaactgcgctccacaagccttttgcttatattaatatctaataatattttaaatgagttaatatgaatattctaagagagaactgtcttgactctaaagctgggcaatgaagttgatctgtcatttggttattatatgttgattataaatgtgtcattgataaagtatgtttgttatctgtctatagaactgtttaaattaagaagaaaattagtgtctatttattcctgggagtttgtgctcttttgccgtaatctactttaaatttattttctaggcagataccaaagtcatactgcttaattctcttaccaatggcttattgcttgcttgtttgctcggttttggtgggggggagggagataccctggatagtacagagaaagaaatactttgtaaatgttaacttcaattggaataattgtcataaataatgactgaaataaaagatctgaacctcttggtaggcactgtcaaggactcatttttactccactaaaatttcaacctgatatcgattggttactttctctgttgagacactgtggtaggtgctttcaaaccaccttattttgaaaagaaataaagatatttctactttgaagtagacaaaatctaaattttaaataaatttctggtcaatgttgttcctaagttatatggcaaaattaaaattagcccttattttaaattgaatttattaagtacttgttagtgaaagtcctcaagattactagactatttagtataagagttgtgtggaactctcagtgactcactgagttgtcctttgcagggtatcacagtactttatcctccaaagttgtctgtgatatataatgtagccctattacaagtacagtgtctattacccaatacatcctttgaaagctggctgcctgtccttataggacccacctcccatgcattctaaaagatctggaagtttgtcttggagaatagatgttttcagtccagatgctgctctcattctacaattttggaaaaataaaacctgtattcatatattctctccacaaagtgacctaactggttgaccacctttgatcctgagctgataagacagcagcataaaaaagatatcacgggatagtgttgttcatgcatcttttaacaactaaagaaacaagaaaattttcatgtctaatttttctccattcagatttacttcttgcatgtatgcctactccctgatgtatgcattttgcttagaatatagtagatggttgaacctgtattaatggacaagagttgagagatttaaccctaataggctgctcactacaaagtccttgtactaaacactttataaatcctgtctccattattctatctatggcctgtcctcaggctaagtccccaaattactttcctttatctgcaaagaccctgaacctagaagcagttgacatacccaagactgtacgtactccagcctgtcctaaaaatggatttcaatgtgagtccagagctcatcacccttattgagcaccattctgcccccatggaacaattgctatcaatgctgtacccttctccctgaaacatcatcattttaaatgtgcacttccaaacaaggaagaccaacactatactgtagcagcttgaacatttcctgaaaggttaaagaaagaataatacactcctaagttcttttcatatactcttgtgactcctattgttacctacccaaatgaaaaaaagtactgtgtatttccagattcctaccactctaccagaatattctgttgtccagtttccctcatagaaagcatcttttcccaaacttaaagactggttcttccatgccttaaattaaacttgttatcttcagcctattagctaacttgaagtaggttaatataattctgtctgcatttcccatttggtgagtacccacaatttatgtttgaattcttatcttacagataaaaagcaaaacaaagcaaaaacttcctactaaaatattgtgccttcccctatcactcaccactaatttatatcggatgttccagtaaaatgacaaccatcaatgaaatagcagctcaaactgtctgcagcgttttctaagtagtggcaatgccctggaggcattcaataacattattaaagatatttgattactaattgggattgtatatcaccctataactgaaaacctgaagtgtccagaatgggttcctaatcttataacatgacacttagcaaatgaaaacggggttggcctctactaatgccggtgttttaatttaatttgctgaaacaggagtttgtaggggaagtagaatcacctagcttcatgtacgatatgatgatacctcatgctccgcgccacacattgatttttaactctggcgcatcaggctgatctatctctctatttgtcagttctattttggaaataaagttttaagtatgacagctccaaaaggtgttgaaggcattccagtgctatttgtggcctggaatcaaccagatgtgtttaggcttggcagtggtttcaagttccaaacactggttagaaactgcctggaatgggaaaggaagcgctaggttctctagctcaggagtattttaacacgcaacaagtggctggcatcccatggaaaactctagcggggagggggggggggggaaacaccatttgcagctagttcagatcctatgaaacacatctttctagtttgcatttcagatggtttcttccctaagttttactcttagaatccaatgactgatcagacactcttagcatcttcttgcctccagtctgttctttcataacgtagcagtttgctcctgtttgagactaggcccactttcaaagcagctagctcatgatggaccatacaaaaccagtgatgataccatttctattgctctcactcaagttcttgccttaaaacaaaacaaaacaaaacaaaacaagacaaaacaaaacaaaacaaaacaccgtaaggatgagaagaattgtctggcggtaaaatgttgtaggccactaaaaatgtcttgtttcccaggacgtttttccgtttgagacagtgacaaagcctccattttgagttccccttcagcagccatctggttaaccaatcacattcgttagtaatcggtagaaaaccagattatgagatgaaaatggaccttcctaaccgacttgggttagaccgaagtgtgtcgatctttcagacataagcagacatgctcatgcctgagtcgggacacgatgacagaattcttggaaagagacttcatgccaagccactaatcaccctgtcgtcttgttctttctcccaggaaagagaccacaccagtgtcagatttgtaagaaagcgttcaaacacaaacaccaccttatcgagcactcgaggctgcactcgggcgagaagccctatcagtgtgacaaatgtggcaagcgcttctcacactcgggctcctactcgcagcacatgaatcacaggtactcctactgcaagcgggaggcggaggagcgggaagcagccgagcgcgaggcgcgagagaaagggcacttggaacccaccgagctgctgatgaaccgggcttacctgcagagcatcacccctcaggggtactctgactcggaggagagggagagcatgccgagggatggcgagagcgagaaggagcacgagaaggagggcgaggagggttatgggaagctgcggagaagggacggcgacgaggaggaagaggaggaagaggaagaaagtgaaaataaaagtatggatacggatcccgaaacgatacgggatgaggaagagactggggatcactcgatggacgacagttcagaggatgggaaaatggaaaccaaatcagaccacgaggaagacaatatggaagatggcatggaataaactactgcattttaagcttcctattttttttttccagtagtattgttacctgcttgaaaacactgctgtgttaagctgttcatgcacgtgcctgacgcttccaggaagctgtagagagggacagaaggggcagttcagccaagacagagttagatggagttggatattgtttaaaaaaaaaaaactgcattatgcaaaaattttgtacagtgttaaggcctaaaaactgtgtggttcagagactaattcctgtgtttaatagcatttatgctttaagcacaactagaaaattctaagaattgcactctacgtatgtatcactacaaacttaaaaaaaattatgtctaatttatattaatacattttaaaaggtgcccgcactaccatacatcagtattttattattattattattgttattcctgtttaatttaatgtgcccgcactacagtgcatcagtattacgattcctcaacactttcctttcgctattcatgaatttcccattgttttacagcctaagtaaccacacacttttaggcctcaattttttattttttatttttttctgtgaaggaacttgaagtgatgcatgtgtgaatttaagataccgaagtcttaaagtgacctggatgtgaaggaaaaagtaagatgagaagtaaagaaagcctttgtaaggtggttttaaaagccttatgcaaaccttttaatctgtgtctctgcaagtgccatccttgtacagtgttcagagggtaacgagggttacctttgcaccagcttcagtgttaagctcaccgtgttctttgaagcacccgtgtcagtattagacgactaggcagcagttccttagtttacatatgtttgtgcaattattttctgtacttttttgttcattaattttgtcagtattacaccaaactttttttgcaacaaaaaaaaatttttttttgcattcatttaattttaggtcaaataacattttatttatgtggctcattttatatttcctaattttatttatttcatactgtagtgtacagtattatagttcttcaatatatagatatattttagtaaaaaaggaacatgacgttgatcatttgggcaaattttacgtaaagagaagagcatttattgtgttttggaacattaattgtgagatgggatttttcaattttattattttatttttgtttttgtttttccaattactggagattccaaatttggaaacttttgatacaatcttgtgaaaacactgtattttcgactgaaaattccactttcttcatcttgttttttagctaacctcaagagggactgttaaatacaatgtatgataccatgacaaaaatctttcctgaattgtctttgtaaaagtattattgaattttcaatttgtaatttcttttgaaaatgaccatgctcgaataaaaatgtagccaaactaagaatgtagttaatgagttctgtacttttagagagctttccttcaatgaccattaacatgtaacatgcttatgcttataataatgctaattatgtttttcaatataattttagtttagcaataattttgactggtaccaataactgttttttaaaattccatacttatgtacagcaattttacagcttttctcaactgatcctgattccagattgtgtattttttatgtgaggttatattattcaaatttagtctatttactttacagacatttctacttttgcattacaagtatttagagattatgtgttaaaaactcacttttctgtccaaggggtctttgtgatttattcagaaaagtctaatttcaaaaagacagctattattcaatgttatttataatatgtaactttttttctaagagttgggataatttatctcactttttgaaatgcagactgtagcttatcctttatctaagattataaaatggggggtgggtgggaaaacaaagctaaaggcacatgctaacaaaaataaccttcattttccaagacagtctttcagtttttacaagacgaccctaatagtcagtatatgaatgtattcataggtttttacacaatgattttttttatcagaaaccagattctaattcctaaatctaataacaaagtcagaataataatacaaaagcagattaccttatgaaatttacagctcttgaatatacgtaactataatatagtagctgtccacatattttttctactttagaatcaaaaaacaaaagcatgattttgctattgaatttgctaaaactttaagtgtgacacctcaagttggcaagaaaaacatatttttattatttagccattttcctaaatttcataaacattgttccttgaaatgacacacacacacacacacacacacacacacacacacacacatacatgccccaagagagagaaaagatgtaatgactatacagaggcaattgagcagatacttgtagaaagcatattttcagctctatcttcaagcctggtgaggactggcattaggagagatggcataaagcattctgctcctgtcatcgctataccagagtttgcatgtttggaaagtttacagcattctttccctatttctccttctttcaatggcacaaataaatacactacatagaaattttcccgattttaaaggctctaggcgatatctttattaattcaacctgaaaatatcaagccattaaattttgtctgggtagaataaatccctgtggcctcctttaaagcaatgtaggtctctgctgcccatggggcatatctgtgtccctacccacaagagacaggaccaacaaagaacacatgagcaacatactctttctccccagaaagaagaaagcatgcatgagaaggagcaaaggggagcacagagtctccctcccctcctgaaatccctctttccaccattgtttttacaaattacttttcacaggaaggctcagaatacctgagtctgcaaggatcaggttaacacttgtaaattgtgacaatcactacaatgtcctatatcttaaggtttctttcctttttaaaaatgcaatttagccactaatagtattgcacattagagctgcataatcttccaactccagggaagactaaaacattggacttatcctaggattcctttccaaggtcataaacaagaaagccctccaaatcatgacacataatctccttttcttatcgaatactcttcccttgttctagtcttaagtattaccctttacccctgaggataggggctgggaaaaggtgatgaaatcctggaactgaacaccccgcccattttctcaagagccttttgtattctagcagatctgggaggttctttcttttttgcacatgacactgtaggcttagttctgagaaactgggcaagagagatgagatttctcagccagaactaacagcgttcatctcccttagcatgaacttgagcttgcagtggagtgggagggcctgaaggaggaaggagagaagggactatatttgaataggtattaataaatttattagatacttttcacaatcagataactttaaaatgttattttttatcttctaaggacataagccttaacaacatcaaaatttagtcataaatttgaagatattccccaataataagtttatatatatacatatatatatatttgaaataaaaaattgttagccatgtttttttgctccaggatgtgtggccatgccaggctgtgagccctggatatgcacacaaacaagtgtgtgtgctctgaagcccccgcacattgtaataaacacagctgcatttatttgagtatgtgttcccgtgtacatgtaaaaacatccaaacaaacacactcagcagatttatttcatgtgcaatggggcaattattcaaataaatatgctcaatacaattatttgagtctcgcatttgcatgctcatcactcacagaactaatactaaaagagggggaaacaccaaagaatttacgtgggggaaaatatatgtgaaagcaatgttattgtagatgttataaggtagccaaagctatggctcccttcttaactgaaacacaatgattttgtattcagtggcatttgtttctaacgatgaatagttatttcactcacttgatcattacatcagaaggactgcagtgtttagattcatataatagcaaactttaaggacctgaagcagataaggatgagacatctctatatttcaaaagcagaatagttctttctacatactttacatcaaaggaacactgataaattattatggctcacatacgtaactataaatttaaaatgttatacatatagaaaaacattcctacattttaaaacattaaaaagtcacagatgactcgtgtgatcattttatatattaataaatactacaatatatatgtgaacacattacaaatcatattggtgaacaaagaggctgtaaagcctctcttcagtatactgacataacctaatatactaaaatgggaaggggcttttagtcactgaatatgcatcgtgaaacaaagatgaagaaactacatggcttgtgcccatcacgaaaaagattcatactgaaggcttagctttggtttttattcaattaaattgtcaaactgtgcacagtgaacttttttttttttttagaacttgagacatttgtgatgttggctgtttaaatctttgttaccttcgctgtgaattgaaattgtacatatttagtaaatcatgcaaacaaaacaaactttttagacaatatttttattggagagttttcttttcctgtatccatgtttaaaaaaaaaagacctcctttcccaaaataaaaaatgtcaatactaaatttaaagaagtataaaggaataattgcttcctttagagcaaatatttaaataaacatggagagaattggcaacatgttcttttggggctaataggctgtgttcaattttttgggttaaagttccagagggcctctgtttcacattcaaagataatatattaatctctgaattaaagaaatgctcttaggtaacaggataaatccctcagtcttcatttgtgtgtgaagtgtagcattcatcagagacatgacattgagacgacatgatgctgaatatgccacaagctaaaacacctctattaaaacagtcacctaccacctataatccagtgtgacatattaaaatactccaaaatacagagcatggagaatgaacaccataattcccatttggccttgagaagaatatgacaaagattctaataatttttgtcaaagaaaatgatgatttaaaaatacatgaagattaaagtggtgacaaatgatcttttaagtatttctaattggtcatcctcattcatagctttgattccacagaaatcacaaatcctaaggcccctgacttgtgagtgcgccccgtcagctttcttcatgctacagaatgtggctgttaggtaggaaatgaaggataagaccccaatgtgttaaaaatagacttcttctccggcaagaagtttaaaattggcaaggacaggactcagaaagaacggccttcacatgaggaagcattcagagaaagattgttaccttgtgatctgaccatttccagaacagtcaaaaggctctctccctccnnnnnnnnnnnnnnnnnnnnctctctcaagtgtgtgtgtatacgtttgtatgagtgtgtttgagtgtataggagtatgtgtgtgtgagtgtgtatataatgtatatatgtataaatgtgcatgagtgtttgactatgtatgggtgagtatgtatatgtgtgagagtgagtttgtatgtgtttgtgggcatgtatgtatgtgtgtgtcagtgagcatgtgtgtatgtgtgtgagttagtttgagagtatgagtgtgtaagtatatgtatatttgtatgagagagtgagtatgtgggtatgagagtgtgtgtagctttactaagtttacgtgtataaaattggatagattgtatcttttaaaaaccaatattcaagagatggagtctaaacagagggcttctgagatactttctatttgttatcttacataaactgaaaacatttaaaatgttgatactggaaaaatacaaagttcttaagagagcttcataaaaactgaagaaaaaactgaaacaatttctaaggtatgtcaacaattaaatagagaaaatattaaattagcttttttccccatcacttagaaaactcagacttctaaaatagggcctttctttaaacaataatcattttttgcccattcttaaaatagttgtattatagggcaaataattacagtatactcctgtccaattttgtttagagaaagagaaatataggctttaaattacttgaaaatgctgatgaataaaagaatataaatttagaaaggagactcaagaacaccactaaactcaaaggaagcagggcactgcatttagtgaccacagcaacctggatcttggttttcacatgtcttctgaacaatattacttccaacagaaacatttcccaaaactacagggcagcccaagatccttgtgggcacacggggaaagcaccaactactgagtaaccctcaaccacttcctgccgtctgaaacactctgtggaggtctaccatctcattactgaacatgcttagaaagtgtgaggacataggattctggttaaaggcaggtcgaaagcaagagggaaaagcagaagtgcaagccaccctgcccaacttgtttaaaaggatattcctcaagtaagcatgcccaagagtaatcaacctcagttctaagcactcaccttccttttcctcaacatcaagaacgttgacaatagccaagacaatcccctaaaggggagcttttgaatcactttagaataaacggtggtggaatagtcaacataagcttccaacaagcagagttccagccacaagaactactgctacaggtgtaccaccttaattttgaaaatgataattaaactaatgactttttatatattaaaaaaaaaacacatttccactggcgttttcattataaaatctcatgttgtaaattccttcatgactgggacaaagttatggcatactatctacattaaaattgatttaaaaaagtgttcctatgaataaaagctttatgtttgtaacattgagaacgattaaaaaaaaaaagcaattaatctatcacccacacgttatagatgaagaaaccgaggtctgaaaatgcttgaaaacacacaagtgtttgtttttagcccacaataatctggaaagcagctaactgcataaaaagtctagtcctctgaaagagagtaacatagcctcttcaaagcatcacttcaaacaccacagtaaaatgttcttttcaaagggcccgaagaagcagcaaaagagatgggttagttcctgcaagaaggttttcttctggtctataagaacttttccatgcaagagcgaaatgaaaacaatctatgttggaagcctgtgttactctaagctgtgacaacatctgtacctagtcacttcttatcacgtagagtctccactgacaggcagagatgttctcaattttgagaaatactcttcaaaaatctgtaactgttgctgcttatagctgaagagactgaggtctgcaagtgcttgaaaacacacaagtgtttgtttctatctcacaataatctggaaagcagctagctgcagattgccaaaactctagccttctgaaacagtgttctgtactttctaaatacaccacagaaaaaggaggagaaaatagggcttgagctttgctccaaggagcagaagcagttggagattaacaaaccagtagcagcagaactgatggaagaatacaaaagaaagtcagagtagaactcctggacacttcctaacccaagccctaaccttcagatgctaaggtttagtgaaactaaaaccccagctcatcctgtagctacaggggacccagaaccagaggttgggtctctcatttttacatagatgatgtgattgcttttcattgttttaagggcaattgagtgaaaataaaaagccatccacttaatggtctagggatacagtggtatagaaagcaaccacacacccctttaagaatgtacattccaggtgggaagggagaacaattacaaggtcccagcggataggacagcttagttaaaaataaaagcaagtgagaaaataatgagcaagatggatgtgggggctaggatttggggtgtcaggaagaacctcatggggagttgagatgaaggataagaagaagtaaggcatgggaagagctggaacaaaggtgtaggaacaacaagtatagacacgaggcacaagcgaggctggctttgtggactagaaagtccccctatgagtgtagtgtaagaggggcagagataaagccagaagaccacaggcttttgatgaacttcttaggttatttggtccagtgtcttatttgcgtaggtgagaaaattgaatttagtaatctcttgagttttgtacagcggtagtctgaggatgggatcattaaccccagtgaattgcctgtaacgaattttgcagccctgtgttttggaatggggggaacctctttttctcagacgtttgcacctgccttgtatctcgtcacaggcagatccgtcacactggaaagcagaaattgtttggcccaaagaaagtttgtattctgaaaactgaagcactagctatggcaaatgggatgctggtggaagccctttccccagtaggcgttttccagccaactccccgtggttgctagtctgctcaaaacagctgggctcgaatcaggcataagcaagggcctcagccatttccccttcctctgaacttcttttaaaaaaaaaaatacaaaacctcacagagctgcgagagaagccaataagaagtaaggaacgtgcagcaggtggtaccatctgtgcccgactaattccagccaaaacaatctgctccctcgagttcccagttgtggggaagggaagagaatctgacagcggcagagtcaggggagggggtggaggagggcagcgctgagtctattattccggcgatccgcaggtgggaggaggcaggttattgatgccagtgaactattatctctgtcttttgctctttacaaccacggagggagatctctacagcgcgttcttgctaagctggcaactacatcccacacctgagagacagacgtgcaggcttgactgtgagcctgtcaccactgagatgggagggacagcttggcaagcgcagcccaccccaaagtgaaaaagtaaacaagagggcagggagatgatgtttattttattctattttcctagcaaccgaatgccctctgtctccatgttcattctttgaaaattacccacagcttaaactgggcttagtgtccacatgctttcaccccgggatggcattttccgaagcaaactccttgccatcgatggattccttacgaagaacgcatctcccttggcatacttaaaacctggggtgaataaatgcactagttcaaggataaatgaagtcgtctgcttttctttagagaggaacagaaagggactgagacagagcatacacaccgttgtagtgtcccaggaaaatacatcttctgaaaagattctcttaacccacggcaaaaattccaccagtgcgtttaggttaaggcaccatccaaggatcgtactagtatttgttaaaggcatctaaggagggacatttgcgttactgcatttctttccgctagcttacctttgctacagctgggggttgagctctaaaagatgggtgcattcgtccaagagggcgttcagaggcttgaagggagagcagcaagaagcattcatacatgaaaagcagtcaaagtgggagaaatgactggaaaggaaaaagtgcttgatcctaatctcagttagatagaagttcaccttccctcagagtgtctgctgaaatactgtggatacgtgtgagtacaaccttactaggaaacaggtctttgcagatgtagtcaagataagccgaggctactgtagtgcactaatgcaatatgacacacttacacaaggaggctttgacaagacagtggcaga

SEQ ID NO: 212 - DNA, 3841 bp, Mus musculus
cgccgagtccatgcgaactgccatctgatccgctcttatcaatgaagcagccgatcatggcggatggcccccggtgcaagaggcgcaaacaagccaatcccaggaggaaaaacgtggtgaactatgacaacgtagtggacgcaggctcggagacagatgaagaggacaagcttcacattgctgaagatgatagccttgcaaaccctctggaccaggacaccagcccagctagcatgcccaaccatgagtcctccccacacatgagccaagggctgctaccaagagaggaagaagaggaggagctaagggagagtgttgtggagcacagctggcacagtggcgagattctgcaagcctctgtagccggtccagaagaaatgaaggaagattatgatgcaatggggccagaagccacgatccagaccacaattaacaatggtacagttaagaatgcaaattgcacatcagactttgaggaatactttgccaaaagaaaactggaggaaagagatggccacgcagtgagcatcgaagagtaccttcagcgaagcgacacggccattatttacccagaagcccctgaggagctgtctcgccttggcacgccagaggccaacgggcaagaagaaaatgacctgccacctggaactccagatgcttttgcccaactgctgacctgcccctactgcgaccgcggctacaagcgcttgacatcgctgaaggagcacatcaagtaccgccacgagaagaatgaagagaacttttcctgccctctttgtagctacacgttcgcctaccgcacccagctcgagaggcatatggtgacgcacaagccagggacagatcagcaccaaatgctaacccaaggagcaggtaaccgcaagttcaagtgcacggagtgtggcaaggccttcaagtacaagcaccacctgaaagaacacctgagaattcacagtggtgaaaaaccttacgaatgcccaaactgcaagaaacgcttctctcattctgggtcctacagttcacatatcagcagcaagaaatgtattggtttaatatcagtaaatggccgaatgagaaacaatatcaagacgggttcttcccctaattctgtttcttcttctcctactaactcagccattactcagttaaggaacaagttggaaaatggaaaaccacttagcatgtctgagcagacaggcttacttaagattaaaacagaaccactagacttcaatgactataaagttcttatggcaacacatgggtttagtggcagcagtccctttatgaacggtgggcttggagccaccagccctttaggtgtacacccatctgctcagagtccaatgcagcacttaggtgtagggatggaagcccctttacttggatttcccactatgaatagtaacttgagtgaggtacaaaaggttctacagattgtggacaatacggtttctaggcaaaagatggactgcaagacggaagacatttcaaagttgaaaggttatcacatgaaggatccatgttctcagccagaagaacaaggggtaacttctcccaatattccccctgtcggtcttccagtagtgagtcataacggtgccactaaaagtattattgactataccttagagaaagtcaatgaagccaaagcttgcctccagagcttgaccaccgactcaaggagacagatcagtaacataaagaaagagaagttgcgtactttgatagatttggtcactgatgataaaatgattgagaaccacagcatatccactccattttcatgccagttctgtaaagaaagcttcccgggccctattcccctgcatcagcatgaacgatacctgtgtaagatgaatgaagagatcaaggcagtcctgcaacctcatgaaaacatagtccccaacaaagctggagtttttgttgataataaagccctcctcttgtcatctgtactttccgagaaaggactgacaagccccatcaacccatacaaggaccacatgtctgtactgaaagcatactatgctatgaacatggagcccaactctgatgaactgctgaaaatctccattgctgtgggccttcctcaggaatttgtgaaggaatggtttgagcaaagaaaagtctaccagtattcgaattccaggtcaccatcactggaaaggacctccaagccgttagctcccaacagtaaccccaccacaaaagactctttgttacccaggtctcctgtaaaacctatggactccatcacatcgccatctatagcagaactccacaacagtgttacgagttgtgatcctcctctcaggctaacaaaatcttcccatttcaccaatattaaagcagttgataaactggaccactcgaggagtaatactccttctcctttaaatctttcctccacatcttctaaaaactcccacagtagctcgtacactccaaatagcttctcttccgaggagctgcaggctgagccgttggacctgtcattaccaaaacaaatgagagaacccaaaggtattatagccacaaagaacaaaacaaaagctactagcataaacttagaccacaacagtgtttcttcatcgtctgagaattcagatgagcctctgaatttgacttttatcaagaaagagttttcaaattctaataacctggacaataaaagcaacaaccctgtgttcggcatgaacccatttagtgccaagcctttatacacccctcttccaccacagagcgcatttccccctgccactttcatgccaccagtccagaccagcatccccgggctacgaccatacccaggactggatcagatgagcttcctaccgcatatggcctatacctacccaacgggagcagctacctttgctgatatgcagcaaaggaggaaataccagaggaaacaaggatttcagggagacttgctggatggagcacaagactacatgtcaggcctagatgacatgacagactccgattcctgtctgtctcgaaagaagataaagaagacagaaagtggcatgtatgcatgtgacttatgtgacaagacattccagaaaagcagttcccttctgcgacataaatacgaacacacaggaaagagaccacaccagtgtcagatttgtaagaaagcgttcaaacacaaacaccaccttatcgagcactcgaggctgcactcgggcgagaagccctatcagtgtgacaaatgtggcaagcgcttctcacactcgggctcctactcgcagcacatgaatcacaggtactcctactgcaagcgggaggcggaggagcgggaagcagccgagcgcgaggcgcgagagaaagggcacttgggacccaccgagctgctgatgaaccgggcttacctgcagagcatcacccctcaggggtactctgactcggaggagagggagagcatgccgagggatggcgagagcgagaaggagcacgagaaggagggcgaggagggttatgggaagctgcggagaagggacggcgacgaggaggaagaggaggaagaggaagaaagtgaaaataaaagtatggatacggatcccgaaacgatacgggatgaggaagagactggggatcactcgatggacgacagttcagaggatgggaaaatggaaaccaaatcagaccacgaggaagacaatatggaagatggcatgggataaactactgcattttaagcttcctattttttttttccagtagtattgttacctgcttgaaaacactgctgtgttaagctgttcatgcacgtgcctgacgcttccaggaagctgtagagagggacaaaaaggggcacttcagccaagtctgagtt

SEQ ID NO: 213 - DNA, 3648 bp, Mus musculus
atgaagcagccgatcatggcggatggcccccggtgcaagaggcgcaaacaagccaatcccaggaggaaaaacgtggtgaactatgacaacgtagtggacgcaggctcggagacagatgaagaggacaagcttcacattgctgaagatgatagccttgcaaaccctctggaccaggacaccagcccagctagcatgcccaaccatgagtcctccccacacatgagccaagggctgctaccaagagaggaagaagaggaggagctaagggagagtgttgtggagcacagctggcacagtggcgagattctgcaagcctctgtagccggtccagaagaaatgaaggaagattatgatgcaatggggccagaagccacgatccagaccacaattaacaatggtacagttaagaatgcaaattgcacatcagactttgaggaatactttgccaaaagaaaactggaggaaagagatggccacgcagtgagcatcgaagagtaccttcagcgaagcgacacggccattatttacccagaagcccctgaggagctgtctcgccttggcacgccagaggccaacgggcaagaagaaaatgacctgccacctggaactccagatgcttttgcccaactgctgacctgcccctactgcgaccgcggctacaagcgcttgacatcgctgaaggagcacatcaagtaccgccacgagaagaatgaagagaacttttcctgccctctttgtagctacacgttcgcctaccgcacccagctcgagaggcatatggtgacgcacaagccagggacagatcagcaccaaatgctaacccaaggagcaggtaaccgcaagttcaagtgcacggagtgtggcaaggccttcaagtacaagcaccacctgaaagaacacctgagaattcacagtggtgaaaaaccttacgaatgcccaaactgcaagaaacgcttctctcattctgggtcctacagttcacatatcagcagcaagaaatgtattggtttaatatcagtaaatggccgaatgagaaacaatatcaagacgggttcttcccctaattctgtttcttcttctcctactaactcagccattactcagttaaggaacaagttggaaaatggaaaaccacttagcatgtctgagcagacaggcttacttaagattaaaacagaaccactagacttcaatgactataaagttcttatggcaacacatgggtttagtggcagcagtccctttatgaacggtgggcttggagccaccagccctttaggtgtacacccatctgctcagagtccaatgcagcacttaggtgtagggatggaagcccctttacttggatttcccactatgaatagtaacttgagtgaggtacaaaaggttctacagattgtggacaatacggtttctaggcaaaagatggactgcaagacggaagacatttcaaagttgaaaggttatcacatgaaggatccatgttctcagccagaagaacaaggggtaacttctcccaatattccccctgtcggtcttccagtagtgagtcataacggtgccactaaaagtattattgactataccttagagaaagtcaatgaagccaaagcttgcctccagagcttgaccaccgactcaaggagacagatcagtaacataaagaaagagaagttgcgtactttgatagatttggtcactgatgataaaatgattgagaaccacagcatatccactccattttcatgccagttctgtaaagaaagcttcccgggccctattcccctgcatcagcatgaacgatacctgtgtaagatgaatgaagagatcaaggcagtcctgcaacctcatgaaaacatagtccccaacaaagctggagtttttgttgataataaagccctcctcttgtcatctgtactttccgagaaaggactgacaagccccatcaacccatacaaggaccacatgtctgtactgaaagcatactatgctatgaacatggagcccaactctgatgaactgctgaaaatctccattgctgtgggccttcctcaggaatttgtgaaggaatggtttgagcaaagaaaagtctaccagtattcgaattccaggtcaccatcactggaaaggacctccaagccgttagctcccaacagtaaccccaccacaaaagactctttgttacccaggtctcctgtaaaacctatggactccatcacatcgccatctatagcagaactccacaacagtgttacgagttgtgatcctcctctcaggctaacaaaatcttcccatttcaccaatattaaagcagttgataaactggaccactcgaggagtaatactccttctcctttaaatctttcctccacatcttctaaaaactcccacagtagctcgtacactccaaatagcttctcttccgaggagctgcaggctgagccgttggacctgtcattaccaaaacaaatgagagaacccaaaggtattatagccacaaagaacaaaacaaaagctactagcataaacttagaccacaacagtgtttcttcatcgtctgagaattcagatgagcctctgaatttgacttttatcaagaaagagttttcaaattctaataacctggacaataaaagcaacaaccctgtgttcggcatgaacccatttagtgccaagcctttatacacccctcttccaccacagagcgcatttccccctgccactttcatgccaccagtccagaccagcatccccgggctacgaccatacccaggactggatcagatgagcttcctaccgcatatggcctatacctacccaacgggagcagctacctttgctgatatgcagcaaaggaggaaataccagaggaaacaaggatttcagggagacttgctggatggagcacaagactacatgtcaggcctagatgacatgacagactccgattcctgtctgtctcgaaagaagataaagaagacagaaagtggcatgtatgcatgtgacttatgtgacaagacattccagaaaagcagttcccttctgcgacataaatacgaacacacaggaaagagaccacaccagtgtcagatttgtaagaaagcgttcaaacacaaacaccaccttatcgagcactcgaggctgcactcgggcgagaagccctatcagtgtgacaaatgtggcaagcgcttctcacactcgggctcctactcgcagcacatgaatcacaggtactcctactgcaagcgggaggcggaggagcgggaagcagccgagcgcgaggcgcgagagaaagggcacttgggacccaccgagctgctgatgaaccgggcttacctgcagagcatcacccctcaggggtactctgactcggaggagagggagagcatgccgagggatggcgagagcgagaaggagcacgagaaggagggcgaggagggttatgggaagctgcggagaagggacggcgacgaggaggaagaggaggaagaggaagaaagtgaaaataaaagtatggatacggatcccgaaacgatacgggatgaggaagagactggggatcactcgatggacgacagttcagaggatgggaaaatggaaaccaaatcagaccacgaggaagacaatatggaagatggcatgggataa

SEQ ID NO: 214 - DNA, 96589 bp, Homo sapiens
  misc_feature (9857)..(9876): "n" at positions 9857 to 9876 can be any base
ctgctgacacaaccctactcccaaatttgcaggcaggagagtgaagcaatgtctgtactctatacatagtcttacttttttcttttcttttttaaagtagctgtttcagcattcaactgggggcaagaggggttggggggtggaaaaagatagtgcaggcaaactttctcagtgctattccatccctctatgtctccccactccttcacacctctgaagttatggcaagactaggtaaagagttttgaacaatattgagaccctcttatatttaccttgaacaaataggatctttgacacttcttgaccacactcagctgcctgcaagagtgcttcctcctatagcaagtcatatcgggagaattcgctgaagaaaggttttttccttacaattgcaaatgaaagtataaaatagatcaccaaattttaaagtgtgcatatgtcctcatctcagctgttgacatcatatttataatcatgagcacgccaggtttcctacaacttaagaaattctatgaccatattacttttccaactttatcagtaaacattgatttctgtataatgcagaaaccagttaaataatttctggccgggtgcagtggctcatgcctgtaatcccagcactttgggaggccgaggtgggtggatcacctgaggtcaggaattcgagaccggcctggccaacatggtgaaactccgtctctactaaaaatacaaaaaattagctgggtgtggtggcaggtgcctgtaatcccagctactcgggaggctgaggcaggagaatcacttgaacctgggaggcggagctggcagtgagccaagactgtgccactgcactccagcctgggtgacagagcgagactccgtctcaaaaaaaataaataaaaaataaaaataaaataaaataaacaacacctaaaagacatgttacatccactctggttttccataatttaacttcatgtatttttcaggtaattcatgatagtaggaattactatttattgatacacctgctctgtgccagacattttgtatacagtcatattttctttaccacaaccagcttgaatctaagtactcctttaccaattttttttttttttttttttttttttgagacagggtctcgctctgttgcccgggctggagtgcatggagtgcagtggcaccatctcggctcactgcaacctctgcctcctgggttcaagcaattctcttcctcagcctcccgagtagctaggattataggcatgcaccaccacgccgggctggctgatttttgtatttttagtagagatggggtttcaccatgctggccaggatggtcttgaactctcgacctggtgatccaccctcctcggtcttccaaagtgctgggattacaggcgtgagccactgcacccagctcctttgcctactttaaaaataaggttcacatgggtaaaataacttgtcctcaatacacaattagtatttaccaagcagggagccacatccagtttatctaattccaaaacctgtatctttgtcactataatatgctaacattgaggatctagtgtcaaatatactaatgtccagtttccagtcaacaagtgctaacagaagttgtataagaaataaaaactattccacgacatctctggaccatgatgtctccttcatcactaacttgtcctgtgcctgggcccaatgttggagccagttgagctagcaagaacctcccatgggagcttttcctaagtcgggtgcctgggagaagagactggaccagaaaatacactttatctgggaagccagaggcaccaaagccagagaaactttggctcaaggacttgagccaatattgtaactggaaaaatgagcctaagtgttaggtccaaaaggcaaaataagccatacgtggaaaaacaagggccaatcacagcatccaggaggcctggaaatgggtcacaatgtgcagagcgggtgggcacaagtgggtcagaaacacatctgggaaaggtaaaaagatgttggatgtcacatgaatatggtgttggccctgggggtggacgtggcagattcaaaagcacaccaagaaccagatgcttgaattgtggggagtcactgactctccctaagccacaattttctcagctaataaaatggacccagttgtaaccccttcagatctgctatcagaattaaatgatacgtgaaaggatttagcatagtgccaagcctagaaaagcaggggttttttttccttagctattattactttatatttgtgattgccatggagatgataataaattttgagagtaaagtttttacatttaagtacctgaaagaaccctgaaaaaaaaaattcacccttagaatggtacaaaattaaaactgagtacagaacaaagtttatagtttgagccttttaacagaataaagagtattaaagaagaccttgaagcaagcatgaagtaatttccaggtcactagacaatttgcaggtgcaaaccatttctagtcccattgtcagagggagaaaaaaggtacaggtcacacccagtcccctacgctgatgtccaaatgtctggtttggtagttttgacctaaaaggagcatggaatggatgctttcaaaatagaaacaattaacagaccctttaagaactacagatataagtgttttgagaagtcttaaagaaaacaagaacaaccaaaaactatcagtgttagtattacatcacgatagtttttccccctggcatttgcattgatttttcagttttacatcaaaaagaaaatctggccttgtggacatttaagagactagggaatttcattttccacttaatacactgattttcttcaccactctaggtacttgaaattagcgcaaaccccaggacagctacaattccaaaagggaatgctcagttcattatgaatggtcttaaagcaaacagtgctctgacagccaaattcctggtcttcaaatttgtaagtttgccctttttttcacaagtcttactcaagaccgcttctgagcttttgcacatttaacccttacactaaaagacaatatgttactaaagagcatgggaaacttcaagttcatacatttggactaaattccttttcaaaagaagtctaatatttataaccaaattatgaccatattgaatacactaaattaactgctgaactaacagaaaggaaatactgtatttattttcacttctgtggctacgcatcctttgaacagttcgaaaaaatcataaaccagccataaatcctaaaatgcttttcattttctttcttcacgtaataacacagcactgatttttcaataaaaaatatactgtaaatagttgttatttttaataatcaaaattaatttgtaccatctttagttgatctgtatatttgtttaacctttcattataataataaagctacaatatagtgaagttttatgcattacttcatttaattctcaataaaatcccaagggatagcattattagtgtacccacattggagattaaaaataaaacaagcttataggagactgcttataatcacacaggtagtcatttgcagggctagtattcaaaatagatattaatactttggactttaactggcacaggagaataaaaatatcagggatacacttacttaatcatttttaataatttaaatcagcccatatgttagtaagtaaaagataaaaaatgatcctaaataccaggcctgagttatttgtcaattgctgcaattttccacttttagacttgaattaatagacataactaaaaatttaaatgacaaaattccaataagaaaacatagtgcataattagtgcacatctctggatttggggaggagagtgacttgattttacatagagtattgtttttcctaattaattgtagtgtgccacatatttgtatgtgaatgcctcataaatggtttacaaattgttaagaagtttatggatatctagaaagaatattacagctcaataaataaacttttacaagtgtagaagagaaattttgcattaaaatgtgactttgtttcttcatcctgagagaatgaatttttaaaaaacacatttaaaatcaagcattagatatgcaaatatgtgttcagatcagagatactaaaattattcaaatgattaattattcatcataaaatgtcaattaataattatgaagcagaaaaggcatctttctaatacatctttatttttcttggcctaaaaagggctaaatatacatgttcaattgacttctatcaagtttttaaaattcaacaaagtaaacaaattgtaaacaagtgaaaactctgaattttaatgagaacaacaaatatgcccaaagtgaagggaagagcaaaaaataataataaagaaaacaaaacaaaaacagttatgttcatgacatatgccgcctcatgctcactcacctgctaggtaacggacagtaacctagcctagtcaagaaaataacccaacaacccaagttgtgaatttgcttagtaatgtgcaaactacgtgacatgatgatgtttctctctgaattgatcaatctttgttggggttcaggaggagtgctttgggaattttttaccctttgcaaatagtcatcagaagaaaagcgcagtttaagtttcataaaattacctattgtaatgtctaaagtctgttaacaaattaagtactactaaaatatggctgtaaacaaactttttcacattgccttaattctaaagaatgcccctatgccaagcattatgcattttttccaggaagactatatctattatatcttgtcttttaaaattatcagtctgagctgatgtgataatatagaagaataaaccattatggtcactgaaatattgatttattttatttttattattattattttacttttcactgacacctggtgaacttgtcgtctctgagacccggggagttattttagtcagggtgtccctgccctcctgctggtagattaattacacattaaacgttctgttttcaaaacgaaatgataaatctggacacataaaagaggcacaaaaagaatcacagcgagggagaagagtggatgttaagaaagaaaacaagaaattgcaaaagggagatatcagatagaaaggagaacgtaggaaatgcaactgggaaagaatttcaagaaaataaggataaagggcagggagggctgaaaggagggccagagggaggaaaagcaggagggagatttttggttttcaattccctggtgaggctgctggcgtccgcgccctcaacgccccagccttccaagttgaggcgaaagccacctcctcgggcctgcgtcgcatccaacttactccaagttttctggtgactcctacagggcccctttccgtccccccccccgctccccgccccccaagccttagtgagattgacagtcgcgtggaggaggcttttccaggcacagcctttctcatggtaatcagcccccggcatcacctcccggccgcggctgcgcccgctcggagcgcggctcgcggaccccggggaccggaaacagggcggcgggcggggagcaggcgagcgagccaggtcagctgaccgggcggcgggcgggggtcgcaggatcccgggcggggacaggtctgggggagggcggtctggtgggagggggccgaacaccgcccccccccgcgacgcgctcctccgcctgtgcagcggggcccttcctggagatcaaatgcagggaccgaagctggcggcgggggttggggcggggtgtgtgggggggggagtggcagagcgcgcggaaaattggggacaacaaccagacctgtttagcatcaataaattaagatgctcatttgggtcctgaagtttgctggttcctgtcagtagagacgttggcaaaagccctgaagccgagattcagcctttacttcaaaaaaataaaataaaatcaacccctcagctggccgccctgctggggccaggtgacgtgcgagattccacagcctgcgggtctcgcagcagggatgttagggacggtctgagcttctctggtcctgttttggttttgtttgaaagggcttctcagagagatgctcctgatttttttttttttaatagactttcccctcctatcctaggctcaactccgaatggattggattgcgagtctgcacgtgagaaaaccgtttggcttggcttggacccctgccgccccccacctcctccacacacacccagtccaggggtcccctttatcaccctttgcttgcaactccaaaagaagttgcccacctcctgagtcacaacacaaggtcgaataattcctctagatgaaagatcagtttcatttcaaaacgagaataggttcctttttttattttctccacatggtacaaaataaacagaatttgctttaaaaaaaatcattagctgtggccaaattcgaattccttctacagcctgtgtgttcaagggcagaaacattgtatctcttcgggcatctgggccgccaagctgagcggggggaggggggagcggctgtgaaagttgaggaaattgacagactgagaggtgaatggggggacaggcaccaggtcctggctggagggaattggaaaacaaaagtgcatccttctcaccctgcctgggtggagggaatcctgagggaggtagtttgttttgcccatggaaaccccaaagaattatttttcccccttcaatgttgattgcaatattatttcacatttccgtgtatctgttgttttaatctctttcgtctgcgctaatctcgaagtggattattaatggggaagacagagaaggagagattcatttgcaggacttattttgctgtgtgaggagccgaaagccagcagcccccagtcctctctcgacttttctctgcgtcctgtgctcctgcatcctcctgatcccacgatccccattgtccccgaactggccctcggactgagggagtgttcggaacaaatttatattccggcttcctcccgaccccatcacctctgccacgttgggaactctctcggccaaatgcctggggaggggcgtgccagtcaggaaccaggggcaaggcaacctagccgcagcgctcacccctcgcggagacccttcccgtgccaccatccaaatatctaccttcatgggaacctggaagactgctttttcaccccaaatcaaatactggctagtcggaactcccagtgataaatgttggggactgcctcctgccacttgagcaattcctgagtccagggtaatcagatgattaggtgtttttaatggaaatacttagggtttttttttttttttttaagtcagatcctaagtaacctgacatttaatatacataataaagacaagcgttttgttagctattcgattggatcctttgacctgaggttatgcttgtgtgtgtgtctggtctgtaagcctccaatggctacctgggtgcctgaagaggagtcttgcctgtaataactctatgcaaagggctccttcttccttaggagtggtggaagggtggctgtaaagcaaacgtctagagaaagctggattccaatcttttaaattaaaaaagaggaaaaaaaggaagaggaagaaaaatggacatgaacagtggtgctaaatctcagaagaggaacttgataagtcacacatatatttagtatagatatataataatgaaagaaatgtaaaatataaaattaagaatgtgcctgacccatgttgaaaatctttgattttatttattaataatttttaagctgaagatcctgaatgcctttcttctatagacactttatctgtgatggggtggggggagagagttaatttatccagcagctattttcattataataaatacttaaattaggaaagaggtgagtaaccaactgtgaaaatctactttcttgcatcctagaacaagatctagctgtggtcgtgctaggtagctattaaccacccccaccccactccccccccccgcaaaaaaaaatacaaaatacaaagacgtatacctctgggagtgtggatgtggcaacccatgtggtggcttgtccctcctttgagtgcaattgccagtgactcttgcattcaaagtcttgctttaggcacacattcaaagcacagttcaaagcagtttatcttaatatagtgttggatcagggtattatttgtttcagatttcatcagactggaaacaggagggtgtaacatatttaacaatattaaagcttaaaaattggtgtgaggcagctctctggtcctcttaacacctccacctttacctttccgaagaatcctaaatgctgtgaggctagaagtttatttgtgctctgaggttctcaagcactttcactctttaggaaaaaaaaaaaagtctcacagttatttaagaaattgagcctgaaccatccgaggataggagatttcttccttttccgataaatgcctgtgctcagcatcctcaaatttggctgtctttatttacttctatattagttccaattatgtgcagtgtaaaccagctttttgattaacaaaacagcagagcattggttaagaacacttaaacttcaaaaaaattcccctgggaagtgggctctgaattggttaataatgtgcagtacttgctaaattgctgacttccagatgtggaaaatatctttcttgtttaggacctatgtaacctgattggattacgacagaagcgtcacgttggaagcttttgagtgattatttaattaaccatacagtagaaagctgtattctccaggaaatcccttccatatttgcataaccaatcccttcagagcaaaggtggagtcttttctttttaatcttactttaattgtaatatcaaaaaatatatactccaaaacttagaccccatgccgtttaatatcatgctctcccttccctgctaagtttctctatggcctttctcgtttctcctcctgcctccctacacactctcccttactttgtagtgaggtctccccgaggtgtagagagattcagagatcggccaaccgagtgttctattttaatttacttagagaccctttattaaaatgccaaactactttttaatattgggatccagtccagaaattcatcatgcacacaccctaatacacatgccctaagatgcagctcccatgcagcatttttttttctggctctggtacctaaaaagaaaaaaataacaataagagaaagggcagagaactttgttccagaagctgtactgagatacctacacaatttgatgtgcatctcaaatctggtcattagagatatctgtataagaagagactatctggattgaggacccgggatctttccctttaactttcgccccttggagttctccagttctgtgaatggtgtgcaccgttttccgccctgtactctgtaggatttagtgatgaggataatgatgccaaaggcttgacgggctgcccattcattagggcatctgattaacatagtaaggaatgtttattttcagtacataaaattgtagaactttgggagcatcgtctgaattgtcagagctgaacagcgaggagcttagtgagacatgagaatatagagaggtagctaatgtgtgggaagctgagctagttgatattctatgagaagttcgtcgtgtccatctcatgctgtaggtgtagggaaagttgttcaggtgctgctcactagtcctttgagatgcaggtgccagtggtctgatctctagttgatgatgagagagcatctactttcacatactgagtgtcttgaagtgatnnnnnnnnnnnnnnnnnnnngaggcgaaggcgaaagggagggagaggaggaagggagggaggtggaatttcatttcttccactaaagcgtttgcggagacttcaaggtataatctatcccagatcctttcccagagagaaacttggcgatcacgttttcacatgatgctcacgctcagggcgcttcaattatccctccccacaaagataggtggcgcgtgtttcagggtctctcgtctctctcctacagaaaagaaaaagaaaaaaatgtcattagaagaggcgtaacacgtcagtccgtccccaggtttgtgtttcctggagtggccgaaagagatcagttctaacctgctctgcaggaataacggtcctgcctcccgacactcttggcgaggtttttgtacagtttgctccgggagctgtttcttcgcttccacctttttctcccccacacttcgcggcttcttcatgctttttcttctcaccatttctggccaaaactacaaacaagacttcgcaggtaggttttttttcctccccttttctctctttttatccctttttggtgtgctcgtcctccatcctccttttctaattttctcattttgagtggggatgtgagtctgaagtgagaaggggtgtccgtgggtaggaatttcaggtgggtttagctcctttatggcaagcttttctcaagagtggcttcttcgctttctcttacactcacactctctctccttgcttttctctcctttttccctcccccaaataatttcccctgtacctgttcattcaggtaaccaaaggtgtcctttgctatccagcccaggaaaagttttattgagaattatatggctggaataaaaactcatcaaggggagaggtcctgctctattttcgcatctagttccaattcattatattcagcaattaggacttggcaaatacctgttaataattacaaaacttggtcagttacagacctacaaattcgggggcaagtctttctcttagacatggcagttcatcctctcccaccgagaaggctgttttctaagcagaaagttgtctgtttttgtctgcttagcgagtttcatttctttatttcattctttgtgtgtgtatgtgtgtgaagtaacacctcacttctgtgattataaataaagaagtgaaagtcctcatggaacttgagtcgtttaccaaagtggaggggggggcactacagctgggaagaaaactgctgtcaggatatcagggttttaaattaggataacttttaaaattgtatttttagtggcaaagtaatatagacatggatttaatagaagacacatacacacatatatcccattccatactttggcactgaaaagtcgagagagagatagcaggagttcccaggaacagtgatgagcccggctaacatgaatgtgtttatctcccacctactgatatattttacatgctccccctgtaatgatgaaggcaagattactaactccagacttaggagtaacaggcaaagataaagtttacagcacaaatgccctgtctctctctctcacacacacacatgcccataaaactagcaacttactttattaaacatgtatttatatgcagtcgtgtgtctcaggatgaatatagacaggccagctgtttcatcccagacacttgtgtgaccatttctttatttcaggatttcccctaacaatttcaaatcaataggacaaggaaagaaatgataaaatatgtcaaacttaaaagtctcctactatgtatgcctaggtaaatttaaggtgctttctaaaatatccacttccccttctctctgcccccctcccttcacccctctcagcaaatgtgtggaaactgatactcactttccaggttttctgcaaagcttctagcacaggagacaataggtgtggggcgtggggactgagtgtgcccggcagagaaagggttaatggcccttgtgttacagtttgcatctgttacatcttttatagccccctgtttaaactaatcctcgaggcacagcatcttcccaacctccaccgagttttcaggattctcctcctctcctgcctgcctccgaggtcccccttctccaagttttgacagtttcaactgaaaaaatgcagcgcctctctcgatttttaggtacaaaagtttcgaagccagaaaggatacgatcatttagtagagcttaaaagtattgccgtagtggttggactttctctttcctttcttaagggaaaaaaaaaattctactggaactatttaagggaaccagtgtgggggagcatgtgtgtgagtgaggtggggggaaatacttaagtaaatattgtcaaagtggcgagggggggtggggtaaaggacagtgtccaaagaggcttataattatatttatcattgcggcgtaaaacgggaaatcttaatttgggggcgagggtggggggaggaagagacagtgcctcgataaactccaaaaggggaggggagggggcgctgggcgagtgggcttcctataattactattatcaatttgcccgagtgtgcttcatccaggggctgtttcgcgttgtttgtttgtttgtttcctctgggaattggggggtggggggatgagaaaagatgagaacgaaaagaaaacctcgcctcaccccaagttcccgagccgggggctgaggacttttcgaaggaaagggtccgcctagccctgagtcaagcggtcttactgtaccgccgtgtgcattccctcatacggtcaggagttatgactcattttgaagatgtaattcttgtctctctgatcccctcgcgggtgcaacacaccaaacagtaacaaacacaaagcgcctcggggccaaggctgggggtggggggcgggaagagcggcggccgaagtttcgctttggggttggggggcgcggagaggtgctcgccggggcggtggcgtgggccctgggcggcccgcgcgcgtttcaatgggcgcgcgatgcccacattgtcgctgtgtttggttgctagatcgagcctgcgtgctgccgaagcagggcgccgagtccatgcgaactgccatctgatccgctcttatcaatgaagcagccgatcatggcggatggcccccggtgcaagaggcgcaaacaagccaatcccaggaggaaaaacggtaagaagcagcccgaaccaaacttttccgggccactacgcggctcgagacccagggagaaggagggggaaagggaaaaggaaccgaggcggcggcggcggcggcgcccagggctctagggcgagcctccctccgcggccggcgccggagcccggcgcgcgcggcggctggaccggggggtgttggggaagtgccgggcaaagtgagcgtcaggcacccgggggtccgagcgcgggggtccggccggggccccgcgcccccagccccgctgcccccctcgagcccctgcctccgccctccctccgcctccgcctcccgctccgctcgcgcccggcccgccgggtctccggccgggcttcgggagcgtccgcctggggcagggcgggggcccaggcgctggatcgcgcaggatcccggggcgggggcgggggtggcagagagactgcgaaggcaggagaggggaaccgggtctgcgcctcagcgaggcttaaagtttcttgccggagtcgcccggccgcttctcggtgcgccaagtaacggtccgcgggcagcggggcccggcccatcgcgcccagaccccggggtgggagggagtcggccggccccgcgcggggtccggtggggtcgatgatggctcggggacggatgactcctctccagcaggctctggcccccaggccggggactgaaggagtcgcagggcgcagcgagacttttcccggcagtttctacatggtctggaggagcccgttatccaggctgagtcaggaaggaggaaggagaaaggagatgggggttcgaggggcacacgcagatcagaggtgggatattaaagggggggggtgagagtttggtaggtccgttttggagacagccagagaagggacgcggggggacagagagaaacagagagagaggaagagagtgagagagagaccccctaggtattaccccaaacaaaatcgtgggaataaaagagaaaagtgattggcaagagcgcggaaggcgcctgggggaggggagagggctggggactagcgagggtgccgggggggggtgggggagctgacggaggataactgagtttaaaaagaaagaaaccaacccccgaaaacaaacaagcgaacgagcgccagcccagactcggaaaggaaacttctcgctcccctcgctctcagcccgatcacccggcgcggggccgcgtagacgctcccgaggcaggcgctgggacgcagcgcccacccggcctcccggcctccgcagccccagcccgcgcctcgcggggaccgcccgggcccacttggagcaactttcctctagagaagacaattgtgcgcgcccccggcctgccccagagctgcgcggcgcggggagggggcggctgggggcgcagtgtgaggtgctggaaggagcaaaacacaaagacgagagaattttgattagagacaaatgatgcttttctctctctctctctctctctctctaggttttgtgtgtgtgtacgcgtgtgtgtgcgtgtgtgtgtcttttgcttgttgtggtggaggtgtcgagccatatgggggagtgatagaggaattttagtcagaaactgttcgttacgttatcctgcctttcccctttgtgctgtctttgatctatttgcttggcttagtattacagaaaaacaagtacaataatatattccgagctgcttccccaagattcagttcaggctgcttctttttaagtctctccctctctctttctccctctctctctctcttaatttaatttttttttcactctggtgtctggcattatttaaggtggtccttacacaggagacctccccttccccatctctgagtaatttagtagacactaaaattacacctaatgtccccctctcctctcttgtgtttcctctgttccttttattaaatgttggttattgattttctaaaatcaatgtctgttgtggggcttttttccccctcttacaagtatctaaagcacgttgctgatcaactggataacaaaagctttgtgtcaaggaggcttttttccctcttctgttaaacagtcattttttttttttgagagaaaaagagaatgagatttaaaacaaggctcccagaagtgttcttttgcagggaagactatttaaagtgtgcatttcttcttgccttcctccttccacctccttcgggattttgccaccgttgaccagcctggccctagcagtgaggtcaggccagagcccaggtctaaggaaatagagggatcctggcttcctgggaacccctaggagacctggcagagagggaggcccgttgggcgcttcgcaggtggaatggagtgccagagatgtccgcagtcatggacactgcaagtatttcccctccacccagccactaacttgggagaagcctccacattcagaagtggaaagttgaattgcacattttaaggcatttagcccagatcctgcacacttaatatcaagcctgtccattgcttacagcttctctaactttgactgttacctgtctttttttccaaataagctgtgggaaaacatgctgtatactggttattgtaagtgtttttcactgggtttaatctgaccgagcaatgttctggttttgagaagcaggtagaagagtactaccaccccacccctttttcattttctttctcatcaaacacatatccaatgcctttccctttgggaattgctaggatttatctgaactgagtggatttttcttctttcctggattcatggaaaagatgtcacttttgagcttgtgtctttgctgataacactaaatatgatgatgcttatcaaaatcatatagaaattcctggaaagaaataatggcaataataatcgtataagtagaagctggaagggaaaaaaagatggtcatccaggaacctagaatggcactttatataattttaatgaagtcaacagtgtatatatagactaaggcgacaaggagataaaacgtgtaaagcagtgtgtgtgttttaaaggctggtcaagaacgtgagttagaagacaatgctatgtacatttaataaaaagcaaaggagaaggaggcagttgaagaaaaataaatgtacaaagagagaaacaagtatctgaaatacaaccttccagattctcaggctagcaagatgcctggcagaggcagtgccagggccaagttaacccatagcgggcagtcagtctcctttcccccacatggaaaggatgaaatctcttcccagaaaataagatgtgcaggaggaaagagggagtggggtgagggggaaggaggcaaaaagcgagttgcccgcagacaagaatgtgtgtcggtttcaagaaagttcagtcagatgatcctcagtcgcctgactcactttgtaacactttcactgacgctggagaggagggggaaaacccagcccccctttttctttcccctgattataccccactatctccacacagccttggagtcagaaatgagcactcggagcgggagatgccctgctgctgcttgccaccggtgcggcccgtttgtaacttgcaaagtttgttgcttttgcccctgattcgggcagcgggtcctgggatgctcctgcttccctcctgcctcccacggagcccgggaagagggtctgcctccccatcccgccaccttccagcatcagcctctgaaaaatctcacagagacatgcacgttgtagcaaaaatcaaatccggaaactgcttgtttcagagaaagaaatgaagttgtcttttaaagaaaaactgaattaggaggagagaaaagggaaataggagaagaaaggaaaagttaaatttgatttttctccagagtttccactaaagggttggggacagtgtgaaggagaaggggagctttttacaaatgcctttggtctctgaacttcagtggcaaagaacagggatcaagttgaatgttctcagggctttggatcctagaggagaaacaatcagaagagcagaaatggttatccctgtttaaaataagccctcactctttaccacttccttaaaggagtggaggtgctggtagtgatggttagaggcaatgagggacggagaagttgctcccgtttcagagatgcttaaatgaaaaggaaagaaaatgcagtcaaccccttctccaggaggtgcctcctagctctcctccctgagaggtgaagttgggatggggcaacgagagtcatacacacttagacaaggaagtttccttcggatcactgtcagtccagacttggttatctttgcaaagtgtggaaatctttggcaagtagctttcttcgtaaagttgatgagcttctagggagcctgttttgctgactttcaaagcactggggcaggttgtgtggcaggtaccagttctgagggcgctccaaagatatccatctccatccttttttctctgtggagatcttctgcaagttttgtcacgctgcacacacacaaggctgggggctatgtatctaggctgatctatttgttttattttggtctggaaaaactaagccaattggggtagaaacatgctttccttcgtagcagagccagtaggctgctggtgtccatagagtgacagtccaccaggactaagggtgggctgaggattttaaactttacattgtttctctgttaccagatacaaataaattcacgtcttccaccatttgttttcaaatagggtaaaaccaagattaaagttccctgctcaactgctatgtcataggtttcagtgtttcccttccttcttaatttgcttaaagaaaattccaagaggttattaaagaccttgatgccatattaagaatatttcctgggaaaaatgtatgtctaccctgaaggtaggaaaggagggcgttgctagcctctagcagtgccgcgtttattctaagatgtgggagattcttttccttgcaacagtttttgtcatctgcattcttccaaggcttttaaggtgcattttcttctgtgtgaaaggaaattctttgtccttttcctctcagcaccgtggcttcccaaggtagacactattttgtgcctgtcacagagagagggagtgcaggtttgcaatgctcacagacaattgattgtctgccctaatgtgtttcatttacatgtttataacgtcaatggtgctggggtgtccactgtaccattcattcccgcattcccacaagggggcaattgtctgaatggccaagtcagacacctttttgattgctctttggttgtcttttcagagcaaagagataaaggaggaaaatctgtgatgcagaaacactagttgaaaatatacagaattaaatgtcaccacaaaagcagatgttaacataagcccaaatatgctttttagccaagatgtgaaggttgaaaaaaataattcagagcagagggaaggatgatttaaaccaataaatatagccctattccccctctttacttcttttctgtctttagcaatcagaagatgaaatgtaattttccttttcatttttaagccttgaaacatccaggcacctcctcattatttgtatgtttgctgtgatttgtgaattttgtatatatttacatagctctgtttatgccaacagcatcagcttaccacttggaaaatctattgaatgactatttgggctgtggggagggtaaacttttaaaaagtaagatccaagtatttcttcatcaagcagtttttaaaaggaaaacgataataatcagtaggctccatggaagcctttgccttaatagctatgtgccaaatacttttatcttgtgtgacagtcatgtcagagtgaaatctctcaggaaaagtgtaactagtagttacaaagtaaataaaggatttcattttaaggtgttctgtagtgtttttatgctgtgtatgtgcatgtgtgtgttttgtcttgtgtttcctctgaggaggtaagaagaaaagccatccatgcgtgtatcttttggcttttctcttctttccgttctctcctacatattatgcatatatgtagcccacatgaatacacctgtttaaaagaaaatcacagttcagatggtgccttgctggttcatttaggaaacaacagttattagaagttggtctgatttcgcgtgtggtccatgaagacagaaaataccaactcttgtgtcatctggtgggaggcaaatgggggaaaaacttttataattttgtagtaaattagagaggggaaaaaaactgccagtctgtgaaaagatttttgcctctccgggaagacacacacacacccagtagctgcaccgttagctgaacccctgacacggcggtcttttgaatgccttaggtatgatttcactttcgctcacatcaatgctgacctgaatgcctttcatatctgatccgctgtgtctctcccagtaaacatcccctgaggggagaacaaagaaaggagctcttcttcttcttaatcacaattcagccctttcaccgccggcaggctccatttgcattctgccacagaaagccaagatgaaaagaaagagagagagaaagagagagagagagagagagagagagaggcacagggtagtagctgagtaaaataacttaggtgtttgtggctgtttgttgggcttcccctagttaccagccttatatagctgatgctccaccaggccctgtccctcctgacaggcatatagtgttacaagatggcatgtctgtactattcatggccacccgctcaacacttgaggtaaaaagtgtcaggaggggatcgaattctcccccagaagcctgttagatttggggtcaggtgtgtggacttcccgcccttaagtgctgcctacgatttggctttaataagtctgattgtttaccagcggaccagagaggtgagggccctgggggtgggagggacgggcgagctggagactgggcccctggtctggtttcagtgacgggtcctcacacccagcctgaacacactgataaatcctcaggaaaactggaaaagactttcccatttttccccctgactttttatgataattcatattttcaaatgaaaggggaaaaaagccaagaagaaactctcaaatgagccaaaaaggaaaaaaaaaattctctgaaaagaattttagggggaaaagttgtgctattttaaaaagctttgagggctgtaaagtgccacgtttttcacaccttctccatacttttttttcagatttttttagtatgtttaacatttgtgagatgacagcctttttgtatctcaaactggatgcttcaggatttgtaggggaggggttggtggtattcacgttctcttgtgagagaaagtttgtgcctaaaggcctccttcctgggaactgtttaaaccctcgcaggcagacctgtcaggttttactgtgttatttgccaccattttcaacatgcaaaagtaacatgcagttaatggtattggaatgagaccacagcaagagcagaaacctctcgtgacaacttttcagcgacattatcttgctcctagactgtcttgtctttttcttcccctttctgaaaccacttttgagataccaataattttctcccaacaattagattaaggatacaatgcgctcacacacatgcaccacacacacacacattcacacacacaaacacacacacaaactttggaagtgcaatctcttccaacagcagagtgaatgatttgaaacgggggcttttccaataacccttgtggaagatttcacttataagagcaaaactaacggatatattagaagttgtgcgaacatgtgacacagattcctgatttttttttctttttcccagaagatttacagaatttacaaaaagagattatccctacaccttccacccctcctatccacccccatgacccaagcaatgaaggatttaggcagatttacttcagtaaacacctttggacacttgcggggaaagtgggagtctgtttgcaaaaggaggcttttgttaagtgaggtacggggataatgctttaccaggcagctgtgatattaacctacccagcaatgcgggaacactctttaactctttgagtgcctggccccttgcgctcagcagataaaatcctggctctccaaagacactcagaattctggctctagcagtttattattcagacaagtcttataggcatgaaaactgttcaagcttttaaaacaatgtggtttaattagatgaggtggacttacattgctcataagccctccaaatggtggtttataattggcaagggaaaaaaaaaagatagaaaaaaggaatcaaggcagcacattaaaaattccaggaaatatctttagaaaagctattttcatttctagcttttaaaatattagactacggtagctagagggaatgaagcagctggggcctctctccttcctataaaagacaccagaagtttgtgatgaagaaaggggcttcaacttgaaaagctatgagaggccagttcggacagtgatatgatctcagccttcgcatcttttcaagggggaagtactgcctatctgtccaaacctgggaggtcatgtgaacctcagagtcagggcctcaggctggccgttaccaacttgagactttccaaagcaagcagagaggcatttatgaggaaggagttaatggttattttttgctgggcacaagaataactttacaggtgttgcatttgggcttaaataagattgccttatttagtttcgaaaaagagtgtaggtgtcaacattcgagcagccacaaatgtgtgagaaagtaaagggtatgagacatgacggaattaaaggtgtttgctatgttgttacaccgtgtgtcaggctgcaagctccctttgtcacagcctcctggtgatttgacagcgcagatctacttcccttctaggtgagacagcatttttaaacttgagttataaatatggtacacccttcgagttgcaccctgcctcccagatccgtgaatcctatttgaaagcatcttgccctgagacacaatgaacaaacgcccgtatacaaggaggctgtgggctcgggggcccgggcagcgccagcatcacagtagctggcattgactgttgtttggcaagaaggtcctctgccaaatcatccaataattaagttttatgttatttgtatgaacgaccaagcatgcagtattccttttcaaatcaaagggaggcttaaaattactttttgaacactttcagaccatggtcaggtcacagtttgggggctgaattaaaatgatctcattcatgatctaattgaggttggcaaaaccttagcagtagcaggagtacataaatataaatcaaagaccaaaatttagcaaatcatatcatttgctagaaatctgctcatgaattattctccgattgccaacccagaagttaaactttgtctcccctcagcaacagtaactgcgcatattttttcaggcttctgacaggaaagttagaggatctgaaaagagaaaggagaaggaagatgatcactgtgtcatcagatatggtacatttgtgacccaagaaactatgagagctgataaagccatgtacgtttacagtggctgctgcagccttggttagaaattaatatgggtttctaaaaaccagactttggaagagcaggcagcacagacacattaagagtgtaaggggagcaaacgtttcaagaagggtctgattgtactttgctttcattttttcaattgaggaatgtaatcatcataatgattcatgattatttacaaatttagttctatcactgagctgggtccagggattgagatttgaagtagtggttagaactagaagacgatacggagctgttagtgtgcatattcaggttacctttcattctttctttctttttaacgctgctataaaattaagactccaaataacttttcctataatctgtgggattaaatgtcatactctattgtatctaatccatttttaagttgtaaatttttcttgtttgctgtgtatgatttcatcttaaacccacacaacactttactataaactagaagaggtctaattctacagttgaatcttttgaagttaaaattttaaatcctgtgtaaaagaagatgttcttttaatcaaacagtaaacacagaactggtcagttggccacctttatatatcacaaatatatgaaggtatacttttaaatcttcaggataaactaaggtgggaacatttaaaaataatctcaggtgagagaggtagatgaccacattcctgggaataggtaactgtcattaatgatttcctaaaatgtattctacattaaaaaaactgtaatggatttctctttaatagttacgttgcccatagacaacatagtgatttttgttctttatatactgtttcttatttttttataataactcaaggaaaggtactcctgacaagatgatagccaccccctcctcccaaatatgaaataatcagtaatagatgaacagattaaaatattgtgctatataaaatctgaggtttttttctttctctcaaatggatgagtaaatttcaaggaattcagtgcccaagtgatctataaatgtaatatattgctttcaatgtttcttagtttaagaaagtatttattgtcttgtatatccaagtaactgtaatcaaggaaattgcaattgcctattcttggaagtacctaagtttctattttagacaccatgcacatcaatggaagtgtttcacatcatgagaattctcagttttaagaggtgaggtttatatataaggaactcagtaagctgtgttttcataataaatagacccattaagagggaaatatctctgagcaaaatggttgtcctctaaagatttcccatcacctttgctctgctgatgggaatttgaaaactaaatacagcccatgtgcacacattcccacatgcacacaaacacaaatgcaccctaggatccaaactctgagaattttcctctttaactttcactacagtcatctagcttgtgaatgaaatacacttaaacaaaaatagtagaggcgaagaattaatgtagattcttgtttagtaggatttattgtaggggggaaatgtgttccctatgccacatgattcttacgaaacttacacctattaatctaagctttaagtgtattatttaggataaattactagctttctgcttttgtactgttttctcccattttccttcagtattaccaatcttaacacagattatcctaaactgattgcaaattattatggtttttaaaacagcattctggagtcctgaataaagatggtattttaaactagtgtttacaatatacagaataaaaaagggtgggggagatttaaaaccataccgaacacttagaaatgtgtggagttttatacttgtgcagataagtgtgaggtagccttgccctgtgaaaccaagaccacaaatgatacgtgtcagtaggttctttgatagggcttctggccacagtgtttttgtgctgtcaaactgctatgttgaacaaacacctcctctgggacagagtgataaatgcagagacaggctggcttcaaccagtctcagcaacctcctcaaccacaccccccactcccagcccacctcctacctcctacaatccagccacctcccactccactttgcccctttacctgaaattgacatttatatagaggtgcccaggattttttaaggtgtcagtggtgagtaattgttgatactccccaaatcttatgaatcagtactctgaaactgcaggcaaagtcctttttctggcaggctttatctagtctttttaaatggaactggactgagcttctaaacttttgccaacttgaactttttccacctttgcttaatcacttgaaaaccacttgctttccttgtctttcccccagtcgctttttattttctaatgttcaagctattacattgtgcaacacagacaaaattttgccttaaaaaatccaaacactattacctcttacttttcactttctagcattcttttagggctaacatttcaaatgtatagtcaactggtctttttttttttttcttctctctcttggagccattattctctgactaaaacctgtttactggtgcctttgtgtgtgcgttttttccccctgacattaaatgaatttccatcttctacttctgcaatctctaagaaatagataaaccattatattttttccctgctcgtattttaaagtggtgatcctgacagcaggacgattattgcactttatgttttagtggatgtttgctgttgctagttacagcaacacttatcataagacagcaagaaaagagtagtccctggtaattaaagtaatgaaatattcatttactctaccttttctgtagtctcacaaattaggctgctacatttaatgcctgcactgcctctgtttttattataatggcagctttcgcatctgcaattaggactaattctgacagttacaatttctgagggatggtaaacagtgaacgagatgtgcagcagaggtattacacgtgaaaagcccttgtctctttaaccttgttgttttttttctcgcagaggttaccttttcccgatggtgcaaaatcgacttgacataactgttcatcagtttcagggttttccctggaggtatttgcatcaaatcagcccagtcaagcttcaagttgaaattggcaggccagaaactcacagggtagagactggaaaagagacagccaaagtacaggcagcaaactgacagcagcagagtgaaagacagaggggtggggggaggttgagagcgagagcttttcaactttagtgtgcgggaaatctcagctcctcctgtactgatctcagcagcaccatatcctgaaggagcttgaaaggttgagattcagaacaccttcagctaattcttaccactagggctcaccagccttgctccgggggtttgctctcacttaatctgattggatgcctaaagaggagtgggcacacttaattaaacggaaggaaagttctgaggcacctccccagcacttattaaagcttgaaagccaaatctcatgatcagtgttataggaggaaattaaggtggtttgtttttttttttttttctaattgttaacttgtaggaaagtgaacaatccctctctttaccaggtttgttttcttgggggttctcttctgagtagattaaatgttcacagagactagagctcaggggactgtccattcaaaagctaatgcattttggctaacaaaaagccagtacaagtagcaaaaattatatttgaagagatactcctttgaatgacatgggtttgcaagttctctgtcaaataatgccctactatcctggtaatatgagaacacgtattaagttgtttaaaaggtcaaaaaacatggcaaaaccttaagatgtctaagatactcaacttttactctcaacaaggtcactttaagaaaaattctatgattgcaaaacttgtataattgcttttacaaagaaaacaaatatgaaaagtgtttcctttgcctgagaacattttttctccttgatgtcttaaaaaaaaaaattgtcatccttccccgtctcttctaactttggagtgggagggggctggtgtttttactagatgatttaaaatcctccttactttccaactagacttgggggtcgaataagcccttgctttcaaaccgttttctagctctgtgtatgacaggcattggctgatctgctgatgcccattcgacaggcactgttgaactaaagtggtgtgacggcacagttttgttaagctgtgaacaaagggctgaagatgccttgctggcatcatccatgtgcatattggccttgtcacagttttgcttgatttaatgctctgtttattcctagatattaaaacttaaattctgaacaatatgttttcaaatactacataccaactttattttaaaagctttaactttgaggaccctagggtccatttgctcatccagtttctgtgtagccaacattaaaacacagctttggaaataaatagattgccagtagcctcttagctgttatccatttaaaaatgggattccagtctttaaaagtcttattaggataaaagatttatttttctttgatcattggttgaaagtcattatttatttccaacactggattgtcacataaattcctaaggaagagttaccttgtgtgtactcagtgcagtcagagtagactttttaaaatgacaaattattaaagagatattcagtaataaaagaaagcctataagaatacctataagggtaggcacatcaccactgagagaaaaaaaaaaatcaagggagtttatgttaaagtgagccctatttaagagatagcagaagaattaagattgagacttaaaaacaaaataattgttatgaaaatccctgttccagaggcaacagctcgcctatctaaagaaatcttaagtttggtactaaatttagattccagcgtcccgttgaatgtgtcttgagctttatctacgctgggtttttgttccccctctgcctctctttccactcttcaggttttcttcaagtgtttgctaagagattagttagcaagtttatattgaggaggtagccatgggaggcagctctctgcttgaaggaacgcgcagtgggtcagagtgagaagatacagggagctaagactgactaaggcctgggatcaggtactttattttctctcaaagacaaaccgcccatagaaaggttggtgggatggcatctgccagcaggagcacagatgttaccacttttagaaacttccaaacaagcattattgctggaataactttatgaaaaaaaaaatctgctgccagaatactcctttttcattatgtaaagaggctataatttgagatattcaaggttatttttacctccattcataaaacagcatctttcttgagagctgttacgagttaggtgaggaaggtggcaaaggagagaaaaatactcagcagcctaaaagtattgctgctgctaataaccggtgagactgcactaagaatctgaaatggaatctccggggtaaaacacatccacatttctacctgccctaagcgtgctttcttagcagtgactgagatgaattgtccatttcttttcagtggtagtttttctccatgttcacttatgccaaataattcccacagccagaaagagtgatacaggtcggggtggctaggaaagaataagcctttattgctagtttttgtataacatcaggcatgagaaagacacttgctaacagcatagattgcaagacactctgtggcctgttctcttagtttcatgagaaaattttgtccaatcccataggtgtgaacaagatttagacatgtaatctccaacctggaaaagaagagagcttttaatatattaatagggcagattcttacttaatatataaagtgaattttggcatcagtttggggtttcctattaatactttgttagcaactgtttatggaagagacaaacagcagttcatccaaatagtcctccttccccaacccccaacccctatcttggtattaactgctttgtcctgtcagcttataacattctatctttaaattactctaaatgaagtcataattctagttatgttttgtaacaagtccatggctaggaccaacatgacttctcaccttttaatgaactgttctactttaggatcttctaaggaatagagtgtaaaaagaagcaaagcaggagatgaagaggtctcgtaaatagtttcctttgaacatccacaattgcttacatggccttttccccttttttccaggctggcagaaatggcctagcccaggactcattcaagtgagcacatttcagaatgactcattggatgattggagggagacacaagccctacgataccaatgcagtgtattaatggagaaagttcctgagattgggagtgggtgtgacattaggctagggtattcctgaagggctctaattcatgtgagaatattaagtgtagatcttctagctatcagttagcgtaaggtttcataaacaggtaatgatggctctttccccccgctacccccccatccaatttctagctgagtgaggaacaggctctgcttcatataaatacgatctttgaatttatctgcaatgaggtacagctttaatgatctgtatctgcaagccaggagcatgaatgtgatcttattgtatcatagtgtagagatgagataggctagcgctacagcacaccagtgcattgtgcctgggtgtcgggagcaatccttccatttccaaagcagcaactctttatttttcatcattgtttctttacctcacttgtatgctccttgtgatacagatctgagtgagttgtgcaagcttcagacttgccagcccccagctcccaggcctagtacagagtaattcataaacttaccatattagactatcagattgaaaccaagggtttctactgtggtggaattggaaagcccattgttttgattatcatttcatcagccccaactgatactagtatgctcaaggaaaacatacttcagttacagttgattttcagattccaaaatggtgctgcaaagcctgtgcatctctaattatattttatgctaggctgtgcaataccaaaatatacgccgcagcaatcagtgagtgaacagtatcaatcaatttgtaaacagatgaagtcactcattcccaaactggttttccaaaaacaattactaaattacaatagaaaaaaattgtacagttactgtatttgtgtgctgtgttacaatcaacataccagggaaacaaaacaatttaatgcagaaaaatcatcattcatctacattataattgcttctttttcacatctacagggcggttaattaaaattgtgattaaatgcggtcgcgctgcctaagatgtcttgcccaaaacaggtggtacagaatttaaaagtaaaaaaaatgtaattagcattggaaattgagaaattgcctgtaagaatcagtgttaatttcagtcagtgatgaggtaatttataaatgaatgcagtggaggctgtgcaaatgcacaattgccttccttgccattcttagcattctcagcatgcaggtgaaaatgttttcaaaatattgaggtaatttgaaaatcaatccatgcattctgtatcttttttctcccatttgtaccaaatgctgaacaaatgctgccatagatggcacaatccatcagttttttactttctaaaagtaatgctgcacatattttagacctagattaagaaatataacaacacaaattgcaagcctaaaattgttacacgggtcaaaattgtacacctgaacttctgactaatggagatttggttggctgtgaaatgctcccatcaataaaatagagacatggggggaaatctgtccatggtataggtggtacaaacagaatgactattaaccaatccaataaatacttgagattaaatttttaaagtttaagaaagaaacagaaaatttataataaggctgatatttttcttagaatcttgaaccgtaactttgttattccatctagaaacatctaaaaccagttaataaagttatcactagaaaaagcgtttacagaaattaactgtttttcaatgtcatctttcctttcaacaaagatgcaactttctacaaaacattatgctatcaacttactatatttcaagcgttctattggcaaatgagtggattctatagattagatactggttaaaaattatttctatttacgctgtatttttactattaaaccgctagacttttaaaatcttttaatggaagaaatttaactttcatgtgcttattctgaccctctgaacaatatgaatttaaaatattttaataatgaattgagaatatggggtttgagtatctggcttgataccactggagttaagagactttgtggggctttttaagcatcctcttctgtgtttggcattctgcaaaatgatctctccatataaagctcatcctaagaatatgcttatttaattgtggcagatcaatctgatgatcaaattctctcatgtaaaatattctacgtgttttttgctgtttcaggcagaaatcaataatttcacttcactctgaagttatgttttgtggtaatacggacattttcaggagaaaggtgaaaaataagaaatactgtatctctgggagtgtcatctttattcattcattcattcatttttagagacagggtctcactctgtggttcagactagagtgcagtggcaccatcctagctcacagcagctgagattcctgggctcaagggatctctgggagtatctttctatcctctgatttcaggcctagtttcgggccttccctcatgacccttcctgatcatttttaggacacaaatgaaaagtgcaatttagaggtgacagctcagctggttgttccaagtggcatgccatcgtttctctcatatttaaatctgtttcccatttaatattacaagtagaaataaaatgagacctctaaatggaggaaactgaaaggtcaccagttaactccatgatccctctcctttcaccagctcttgcctcccactaactgtgatgatgacgatttcatattccagcagtcagttcactttcagcgagggtgggtgcagacttcatcaaagaatggcttcctggatttccttcaggacctgtgaacataagatccgcaaccacatggggcttggctcaaatttcagcagagtggtgggatggaggaggtattatgacgtgctccaggctgcactggttctgagtttacaaggggtcacaagggttagagaatcacagatgtcaatagagcgcgaggaccttcctaccccttgaaatatttgcagtagaaatcttacctctttacgtttggttcgtagtgccccatgagcttagcacggcaatgtggagttacttgtgagatgccaccaatgtttcatatatatatatagtatattatataatatataatattaatatatattatataatatataatattaatatatattatataatatataatattaatatatattatataatatataatattaatatatattatataatatatattattaatatatattatataatatataatattaatatatattatataatatataatattaatatatattatataatatataatattaatatatattatataatatataatataatatgtatgataatgacatatatatatatatgttgagaatgacagtgtctttttatacaagctccctccaccaagtatcatctctgtactcttacagggtcatcaagattgtcagaaaaggcctggactacatgcctgtcccagcactagattggtattttttaagtccttttttgtttcaaagtttgccatgtgagcttaactcagttcattctgctgttattacaagcatcacctctttgaagctgttatcagattcatgaaagaaaaatgcgcattttctttttctactgagggcttctttcacctttattcctgagagtgatcagagctttgaattgtaaaaaaagaaaaattttctcattgtacaataattgaaaagtatgtcatcaggtcctttctaggtcttcctgtggtatgtcagcagaaaactacagtgtttgttcattttgcattaattacacacctactatgtgcaggctctggctgaggtctgtggatcaaaaaatggatgctagagcctgggcccctgaggagcttgctgtctagtgggaaatgggggtgcatttaagatatgatgaaaatgtggcaagtgccacaaagaactttctacccaatacagagagagtacagaggatggcacaactagatctgggagaaggtggtgaggggtcacttcatggcagaggtgacttttgaggagactgttgtcatataacatggatttcaccagcaagtgagggcacagcacgctgggctgagaggatggcatgtacaagccaggagaaagggtgaacagcgcaggcattgtcagccaactgagatgtctgaaacacagggcatgagcaaagaggatgggcttgatttgagtctgcaaaggtggtcagggagcagaagaatgtcctatcccatatttttggcttgtatccagtaaataggtgatggtgagcttgcgaaccatgttttatagaagagtgacataattatatttgcgtttcagtgacacgtctctggcaactgtacgaaagatattatcatctaacatttgttgagtacttaacaatgtgctgggacccgtgctaagaattttgcctatgtcatctgatctcgccccaacaataatgctgtgaaatgggtactattattttcatactatttttactgatgaggaaattaaggtttagaaagggcatgagcctggagtcaggaagaaagtctacggttacatgttactgtaatcatggaatttctagaattacaagcaacacaggcaataatgatcattgactagaaggacatttggaaaagaaaacccagcgtttgaaaaagagtgaggcagtttgattctgtttctctgagtgaatagtgagactaagtggggtgtaaggatgtttcatcctcaaaatttattttttctttcattactatgtcagtttgaaaaagaaaataaaaaatggttgttgatcctgaagaaactaatcctagaatgtgctacatctttgagagtttggaaagagacagttaacatacaacccttcaaaacagtggaatttggtaaaccctggaacactgttcttgctgatctaattcatgacattaaggccttcctcggccttatgaggaagcagatgaaaataatccttttgcgatgactattttcccccttttctgatttaactcttccattgcctaagactcaccaattctcaaacttctaaattctccacactgccttatctctgccatcccatggcaagtcctaaagctgctaacattttgtaacaactatgtgacaaattgttgtgcttttattcaggtcggacatctttgccaggcttgcttgttgtgttttctgtttggctgtgtcatgggaccaaaggtgcctgcctttgtacagcatgtcaaatctggttaacatgcagccatttatctttaaaaccactcctgcacaatggcagaggtgggccaagccacagggctctaagcacaacccaatttttcagaccatcttttctgcatatagggagcacgttggacagcagacaagacattttgtgatttggggaatctcttagagacaaattgtagagtgcaagtgcagtgtaactggactgctgggtgcccagtgaagtgaggaaaatcagatacagcacaggctgaaagaatgaagcaagaattcatatctctgtgcagaacatgcacagtactttgctcacacagagagttcacacatagacaaaagcatgtttgcttgtgggttattttcaggggattctatagccacagtctaggcgtatatatttgcacgtaagctttctttctgcattttgtactggtaggtgtgtctacatgtgaacatgtaaacatgcttatatgagaagacaatttgctgttgctgatttaagacacgggaaaggcctcctagttcactgaggcgtttccctcctaatgtagtagaagcagaatctttttgttttctacaattgttttaataaaggactctgtgtgtgtttaaggaagactcagagccagagtgtcaagtgctgcagtgaaaaatactgaagatttttctttccataagacagctgcaaactttataacccagttcactctgggttttcatttctcaattgtttcaaggtgtcttgggaatgatttgcccttaaataactagttatcaacaaaggagaaaaaatagcaataaaaaatgtgataaacctgcatagactagtttaactaaaatgaagaatttccttgcttggagcagttcaaggaccgaacatagcaaaactgtgtgatttaaatgaaatattcagagtggtcaacataaatacacatgtagacaagagatagtatatgtgtgtgtgtatacactgaggttacttcttgaagaaataggcattttttcctttctttttgctttttctttcttttctttttctgagtaaaggaccccagagattgtctttcactttgaaaacaatctctaatatcaggaaaatgcgctgtttgtttatgcgtacataatgcaagtttgtccgcctgggaactgcagcaaatgggagaagtatgcatggatttcacaggtaacaggattacgtgggcacataattgatccatttggagaaaaaaaatgacagtgctctaaagatgcctaggctttggagatggagtttatgaaacaggcatttgtaaattcaaaggaatcaatatgtcaattttattacatctcagaaccagctgggcattaaaggaacagtagccttaaaaaaaattacagctgcatattcctacgttgtctacctttcttaaaggccctagaatttaaggaaatgaacttagagatgtgtaccttttcagaaatgaatttacattgtccaaagagaacaacaatttaacattatgtcagttatcaacctaaaaatttgattgaaatgtctgccttatcattacaattgaagtctattaatagatacagataataagcagaatagtgattttcacataggttgcactgtcaaggattcattggaattcatatttgcattgtgcttttcaacagtctagattttacctcttcactgatgataggacatagtttaagagctagcctttgggtgtcccacagaattgggtctgtgcatgtgtgaaatattcctgttttattagagtttttgacaatctatttttttttttttttttttttttttttgagacggagtctcgctctgtcgcccaggctggagtggagtggcgcgatctcggctcactgcaagctccgcctcccgggttcaggccattctcctgcctcagcctcccgagtagctgggactacaggtgcctgcaaccacgcccggctaattttttgtatttttagtagagacagggtttcactgtgttagccaggacggtctcgatctcctgacctcgtgatccgcccgcctcggcctcccaaagtgctgggattacaggcgtgagccactgcgcctggccgtttttgacaatctaaaaagaccaagctattttaaattattaagttcctaaataataggatttggacagcagccataagagaggtgaatgggatgggaatttaagatactattttaatatcacaaagaggttacacaactaaggatgaaagttagaagctatgaattggtccacatactctgcatgtgctgtctgctagaggctgcaaggcgagctgcttcactgtttcatgttccaatctccaccacccagactcctgctccaataacatctctagatctattcacttgtaacaaatggagcccagttctcctccctccccaaggaggccagacactcgatacaatgaaaagaacacaggattcagacccaaacaaatttgtgtccacattctgattctgccatttactctccatgccatgtgcccctgggtgcgtttcttaaccactctgaacttcggttcttaatgcttaaaaatggggagcagtatttgttttatagaatctttgggagtattacacaaaattctaaagacagtgtctggagcctagaaaacgctcactaaattctgattatgactgtttcaaggtgtgactaatcaggatgccaggaaccctacgatggaggcacttcagtttctgggccttgctgaaacattcttgaaaagaggaaacaataaccgtagcctgagatattcgttccttttttttttactctttggagagtacttaaaaaaagaagaaaaaagaaatagtcatagtgattggcatgctattctacctctacatttccaggaaatatacatggtactttttcttatagaaacagcatctcctccaaaaagaatacattctgagatgacttttgtcacagcacttaaaatatctgattcctatttgtctccccacaaatgtgtaaatggcttgagggcagtcttgcccatctcagctcaggccatgacatacaaaaattgtttcgttaaagcaaaggtataatgaatacagcgggtatattaaagattcagtatacattatcatatgtagaaaaaagctttgggtaactttatgtcagattccctaccaccatattaataactttttgaaattcactttgtgacagctatgttattttgaatacttgagtgggtttgctttttgtttttgtttttgtttttagtttgtatttaaatcaactggctctctgcctttctcaatgacacctttgagacttgggagtcagggaggcagagaggcagtgtgggtgctcggaagagtgtaggctttggacatctgggctcaaatttggtttctactttcatacaagccataagacctgtagcaagttgttcagtctaactgcatctctgcttctcataataatactcatgttatagggcagttgggaagaaatactggtaacaggtaaagtgccaagcacatagtaggtgattaatgttctgtccccttcctccactcttctttgtcacttgagcattcactttgggttggcatttagtgagctccttctgcccgtcaacaagtcaatcaacatttaatacataccatgggtagatatcttacccctgttccaaatttcattatgaaaattgggctattttctactcaaggaaatgagcatgcagaagtaccttctgtacttagaatcacaatcattttagctattttccgcttaatctgacggtttctttgttcccatcatcttttttagtgaagcactttggtgtttctgcaatcctttgctatcattctgtgcttgggtatctcagatctctcttctcccccgatcctttgaagacatcagaaaagaagaagcacaaggtctcttgactatacgtttgccacacaactgtgtggattggttagttaatagagttgattaaaacactttgtttgattctgcttaagcataccagaaatacattcaaaatctacagctacaaaatgtaaagaaggtagtccaaatatagtactacataatgaggctccctgttggtagtatataaagcagtttagagtatagcttcaaattctaatgaagatcattttaaatcttgcactgaattgtgaatttaaaattcccatgttctccataagtatctgaagaggggcatgtaaataccataagtgaattaattactgccttaagttggtaaagcatgtgtgaatccaaactttattcttgaacttgcacttctcttcccaaggttttttgaaccatttcctatatgctgagttctgagtacctatttaactactgaggacatatgaagaaggtagttttctttgcatggattaaatgtttcaatctctgaaaatcaccaccaccacaacaaaaagtctgcccggcaccatctacatgtacatgatgaaattcctaaagcagaaaagatatatttataatctgaaacttataaaaacatgacaaactgttaccttcacttttgtgcccccttttttcattaacagtattaggtcgtttttttttttttttttctcttgagaagaaacgaaagacgaagtggcaagaatatctttcacttttgctcacgttttggtggtgtaatattgggaccactgaagtaattggacaacttttccgagctgactcttctgaagtaaacccaaggcaaagggaaaatggagctgctgctaggctcaactgatggcgcccacatggcgcccaccccagctccttcagagactccatcatttccacagaagggccagaggccctgccaatatccgcacatcactggcatgatagaccataacagcttcttctgagctgttccggtctatcgtgtcaatgcgtactcggggagtcctcaacgcacggatcactgacacggcactacataacggctccttagcagccattattgggtatcaagtcaatgcctactcagggaggctttatcgcagaggcctgcacgagcagacacattccgaatactaaaattccttaggaaaattagtcattgcccatgtgtgatagctgttttccattttgaattttaaccattttgggaaaaggaagagaatgggaaataccagtatagtccgaaaagcccttaaaaaatgagtgcgaaaagtggaagggtggagtggacataggaagatgatgaacttgtcattttttcctttccatagcttcattttattgtgtcaaagttgcagaaagcacttcactttcatcgaggctctttttaggcagggtacagccaagaaaacttttttatggctcagatgtaaatcctagaaaacgtagtagaaatgatggcaggatctctaactgtaaaataacagtagtgttagtagtaagtgtcattataataacgttatagaactctgcacatcaaaaataccacattttatcatgatctctgcaagagatttctgttggtagtcattctagacttctaataaataatacgttgagtaggaaaggttctgtgaggatccaaataataatgaaaatgacagtggtgatattaataataatagtacagctcccatttattgtatcattattatgtggcaggcatttgtatacattatctcatttaattttctcagcagatgtgacaaatcaggaaactgtggcttagcaaagttaaataacttgactgatgtcatgcaaccactaagtgacagtggtgggatttgaactatatctggggagagtcatgctcttaccattgcattgcctctaatgatcatcactttcagggaactaggtgtttaattagaatatcccaacccattgtctgcttactgatcaggaaactgaggcagggtaattttagtaattcccccaaataataaagagagtcagaatgaataccagaaagcaacaagaggcaaaaacagcctttctctctgacaacatgttaaccacaaacaagacatgggaatttcagagcctccgtttgtgtttcagaaggaatgtccactgttgccatcagtcctgaaaagatttccttgcaccaaatcaaaatggttcgagtttgctgttgttgatattttttttccttttgtgttctgcttactgactgacatctgctatcatgctaagcaggtgttcctatgtaaacgaacgtgccctgtttgtgtttcgccatcctcgctgctgcgcacccaaatgagcagcgtgattaagaatcctgtaaatttttgaaaggaaacggatggctaccctactagaacataattacaccgttccaacatccgcagctcactgctgcagcagagttggagaacagcagaaattaataatatataatagcatcattctagtaatttataaatgaaataaagtagagaggagattctgctgatatgcattttctccttaattctaaaagacaaagtatagattagaattttagtggggtgaaacctggccagcagtctcccactagttgcctgattcatgataggagtgtttttgcttagggaaaagagctaatatgttttattaggccagaggaaaaaaagaaaaagaaacatgaataaacaaggccctctaaaggcaacactaaataaagggggtctgaaaaaatctctgtggattgtgtgcccactgtatttaaaaagatattattactttaagacttcaacatgtgctgcattttttctttcattgtaataacataccaccataggtcaccccttctgagaaaagagggactgatcagttaaagatgtggcccaacataaactttatgttaaatagcactcgtgtaaattctagagatctgctgaacaacaatacacccatagttagcaataatagagtagatttcatcttgtatgttttatcacaataaaaaagaacattcatgcctttttaaaaacattattttgagtacccagtatgtgcaaaggagcctcttattacaaatcatcgttagattaagggagttgatgcttttagtcaaccatgctggagaaagaacaacactttctaaagaggcaaataaactatatgttaaaagtaaccagtccatttctctgtctcatagggttgtggcaggcactttagaaactttaatgtttttctaacttcatttaccgtaggtaagatgcctaacaaatggatgagctcagttgtttcaagagtttgtctcccatgagccaatgcccatcacacacacacacacacacacacacacacacacacactcacacacgagcaattatccttaagaaaaataatatttatagcacttaaagtgttatttaagcaacttttcctgcttaattccaaagaatgacaatacatccaaaaaaaaaagtcatggattttcttcctttaattaaacttagagaacatgaaaatactgtttgcctttcaagagaagcatgtccatttaagatgcttattcatttaagcagtattcatttaaaggtccccttgagtattactctatgtgttttgatttggttcagagaaaataaattcatttaatagatttatttcattaacaggtatttatttaagtgggttccactgtatttaaatctccaaacagtttccattacttccttagctcacttgctccatgttgactaattttaataagcctaaggtgcctagggtcttattgagtgttcagtttgatcaatatggttaaattaaaattgtgcaaaatataagcaaatgtactctaacaacacagtgaaaaatgtgctgtgcactaagcattgattggtatgctgtggacacagatatatgaagctgggtgggcctctgaactacctggaaactgccactctcctccaaagctcccctggctttagatacatccatgtgatctcccacccgttcatggagacagcagctcagatacccccattgaattagaaggggaaggagattcatgtcaggtgttttgctttttgatttaatggaaaacagcatgtaaggctcacagtgaaatcctatataaagaaaaaaagctaagattttataaaagttcaactttgagtattgctgaaatgctttaggtaataaagaatgcaggccctagttctttttcacagaataactttttaccgtaattatccttaaattttaatcatttggtagcttgaattctttttcagagatcttacttgtcaagtttgttttagcaaattacaaaaaaacaaaaacaaaagccaacctgatttttaaagtataccaaaatcagctttgccattggtactgcatttgaaaacctagtaagctttctaacaaattcattgctttctatataattgtaaagttaaatagataactgaatatttttagtggattccttttagtatgaataagtttgtatcttctattcctaaatcaatttctttacctttccctttttctcttctttttttctccttttttgcctgttttatggcaagcatacttaatattcagtgtcaatctttttaagcttttcaaaaatctaccacaatcacttaccaatcataagtatatatcattcaaaattgttcctgatatgtgctggctgttggggcagtttctttttcctacctgttgtgtgcctttgtacctatctttaatctcttcttgctaagtgatagctaccatcacaacactggctttccttgatagcatatcttcctgcatgtccaaaacttaagttcacatgagcagaagttgttcttatcaaaggtaaatcagaagttaaaaaaaaaagcagagagataaaaacatcaaaaatgtacatcttgcaagcaatgatgttgaatttgggagaagtgtgttctattgaaatgaaaatcattttctagtttaaactgatcacggaagtttatatgcataataaggatttgaagtttcctatcaaattaagtacagtgtttgagcttcctaacatttaataataccatcaccaatacacctgcaaaataaaataatgtttgagccccaaaatcatcagaaatatgtagaccaataccagttcagaagaattgactttatttttgtaatggggccaagaaaaattcttaggtttttgtttagttttgtgcttgttaatcttgatttttcccagtgttttgcatgttttgagtttttaatatcaaaggtactgctctttgtaaacaagtgtaagtttacccaggcagcttcacttacacccttcccttgtaatcagatgtgaaaattacaccctcccttttggatacatgataattacacatttcaacatgcaaagaattgtctctgtttcagttgttggaatgaaaaagctgagacatttcagtaaaatatattattatattaaagatcatttccataattgttttcgggatttgtaatcaaaaccatgatcaaggtagtcttagttttaaaaagaatacacatggaaataaggagaggataaaattaattgccgagttccacttgaatgaccattcttttattttatgaaaatacagttaagtacattatattctttctttaaaaaaaaaaaaaccttctagtaccttatttgacattttctttctccatgttcgttgaattacctattttttcaggtcgaccaaaaaaatgtagaaatacacatttttgtgatcaaggtgaaaaatttagtcagaagagagatataaatacaatgaaggaatcttttcaagaaaagatgtgtttgtttttgtttgcaagagtgcttttcagccaaatataaaattttgtaaactcaggtaaggcacctcacacttcacaatcagacttctggattcatctagagtatcactcatatcataggtaaaaatatatgtcactattggtataaaatacactgaagccttaaaaatgcagaggttttggcaaataacactaactcaaaaatatcttgtatatccaaggagagggtttaaaatcaccgattcctttttactttcttaagctaagaagaaaaggaagagagaggccaggcgcagtggctcacacctgtaatcccagcactttgggaggccgagacaggtggattgcctgaggtcaggagttggagactagtctggccaacatggtgaaaccccgtatctactaaaaatacaaaaattagccgggcgtggtggcgagtgcctgtaatcctagctacttgggaggctgaggcaggagaacagcttgaacccagaggcgaaggttgcagtgagccgagatcatgccgttgcaccccagctcaggtgacagcgtgagactctgatgcaaaaataaataaagaaataaaagaaaaggaagagagaaggcagcattagatggctgatgttatggcttcgtgaaacagtttatggcataaagaaataactccccaactccttagttttccaagtatgtaaatgtttctgctcatccaaacactagcataggtaagtgaggacacatatttcatctagcccaaatatattttttaaaagaatccctgcagattttttgcttctataaaaaatatcccaacccaaatttctaaaaattttgatttttggaattaaatgataatactaattagcatttacctatacatccttttctattttaaaatcattgcataatctggcatttatatttaattttctaaatcattttccctagagagcattcatgtaattttagaacttggaaggaaccaggatttcaactatactcatccacagacttttcccattgggtagaaattgaaacagaactgacagaaccaggatttgaataccagccttttgactccaaatcagggacaagatgcagttttgtatgttaattatttttattggttttgatattgtggccccaagatccatagtcttattttcatgctaagtgactctttactctgaagggccaggttataattgccatgtatgccaagagtgaagggacccaggaccagaaaattcagtatgcccgggtggtgagtttttagacttatggagctgcatgttctgaactccacgttctttggttttactgctcctgtgttttttgacagttgcttttttttttcttcataatttctgtacaggctgggcagagagttcaggaaatgttccaccgtgtactgacattcccctggcaataagtgggttcccacttcagtcgcattccactaagcctattttggcaccatagagagggtgatgagagggaagagtcagtggaggagaagacaggaaggttgccaggaaggaattgaaaggcatatgctcctggccccattgcctgtgtctgccttcaccacctttagcttcacaagcagtggccatggcaaataggaaaaggtttgggtgggagaaacacagaagaagccattcctgattaggccatgtgtcttccactagtttccatcagagtgggctgaccgatctgtgaagatctgggatcatgactcagtataacaagaagagtcctacacatttgattcaggaaatttgggctcctggcccacccagccctgccttccaatctcagcatggccttggacacatccttaacctctctgggcctcacattcctaatgataaaatgcagggactggacagagattgcaaactggtggctgacagatgtttgatttgtcccacacagtattttaaacacatttgaattggttgccaatatttaaaaattgggctatttcacacacacacacacacacacacacacacacacacacacacacacacacaaatccagatttccagctcccctggagaactcagatgatctggtgtttcgggcccacatagctgcatggaaagaccatgtgggaacaactttgagttccgtaagaaaaatcaatcaacttccctcacctgcttggcctgtgtagacatttgagtgtgggaccccaattctctccaagactcctttgaagctctagttttagaattccaaatatgatttgcttgaccataagaaatatacttaatccatagtggtttctatattcacggcagaatgctaaggtatttgtttatacaatcagcatcaggtaaaagttggaactatcttaggccaaataaatcagccccatttagaacaaatgctgactttgaaatttgataatgggaggcaggaatagttcagcaaagatagcctttgaggtagttacaagaaagatggtttggctcctgactcactattacctacacagcgaactgtgtattttgcaaattatccaaaagtagattctttaaaacccaaatcaaataatacaaggcccttcagttaacattttttcacatctcccactctaaactaacatcttcataaatattgagatcatgaactttttctgttcatgtaattgcaaacaaattatattggcctgggaactgtttgatcttcttcaaaagtaaaggaactacattgattttaaaagttatatttttgtaaatcatgtttccaaatgtatccactttaaacacaaaaggtaacatttgcgactcatggttatagagtgtttaatattgtacaaggtgcattgacaaaaatatctcatttgatctttacaacaattgtaggagctagacagagaagacatttaatacaaatgaggagtctgagacccagaaaagttggatgactattggaaaattggcctattacttgcttaatgtgaaaaagagccgggattcaaatctacagcttttggctccatatttaatgttttccatgccatcagtatgcttccagtgtcttagggtatgtgtgtgtgtgtgtgtgtgtgtgtgtgtgtgtgtgtgtgtgtgtgtcttacctaaacactgactttttctctctctctgtcatgaacaagaattgagaggttaaatgggaattgtctcatgaattgtctcaatgttttctaagttgaatgaagaatcttttttggtagctattcttaagtgaatgctggatttttattaagggaagctaacagatatttaaaagcaccctccatatataaaagcacaatccatggaagcatagtgcaaggaataatgatatagacaaatggaggaggggcaataaaaagtcataaaacaggcaggtagaggtttctggaaaaataaggtggtgagggaagagtctaactgtaaaagtaaaaaggtagaagatagaaccgttgaaaaaaaaaaagaaatatcagaaatataaagagaaataaacagcaagaagactccgtagtaatttaagaagtgaaaacttttaggacagaggtaggagagaaatgggaaacactggagaggaagtaacaactaggaagtgtggaagaaaaacctgcaggccagaaatctgagcaaagacttgagagaggatgatggtaaatgtgaaacattgaaagggatgttttaagggattcagacattgagaggaaagtaaattttcatcacaacaccccatgacgacaggctcaacacatttggattatgagaaaggaaattaacatggttagaacgaaagaataaaaattagtaagagaaatctttggatgtcaatggagaggaggagaaatgatattaaaaggaaagaaggcatgggtggaaagtagaatgagatgagaacctatggtaggtggaggtgaaaaatgaaatgcgtcagggaagatcatgactgggaccgccgcacactgcagtgatgaagacggagaagctattcttcagggaacctgcaaataaaaagaaaccttaagatgtatttggagggaacccaccccagcaaggtgagaaagcaagaggttacattctgcaaaaagagaaaatgaacggggagaagggggaaaactaggggaaagagaaaacagcaaatcaaagttatggagcgtacagcattgaaaggaatgaggcattctgttggaattattcatttaagcatatgggtattggcgtcccttttctaaaaccggatcctctcccttatttctcatttttctataacactattataataaattcacatggaaaagtacaaggatgagcaattttttactttagaaatgtttcaaaaggggaggtaaacttgatggttatctgtctgaagggtgacgcactatagtggcatgtgagaatgaggccagaggtaatcatcagttttgaaattgttctttcaacaaattcataatgcatataaagtaactcgtgcacacatttatggcaaaacatactctagatattaatttatattgcttatactgaagatctcttgagttttcaaaaagtttgatttacagatttttcacatcaaaaattttttgtagattctattttgtaattaagatgtgtagactcctcaataattctttaccttgatgctgtgtatactcatttatctagattaaaatacttccttgccctgaatgttctaaaagtgtaccccttggggctctagaatttagaagtctcccttccccaactatttctagtctaccttttcaattgagttaatataatggctttagaaatacaatttccatgttgctataaaaatggggttaaaagtcataacaggcacaagaaacaggaggaaatgagaattgtgtactttcagtcacacccgggccatgtgctcgggccacatacagcatgcagccctccggagtgggctgtgtaacccggggcacacttgaggtcagggcacatagaggattaatttactgaaggtggtagacaatccctctgccacaaatgcaaacattttttcataagcgcctgaagcaattagttctcttcaataataaatttaatcttttcctccttcctttctttcctcttcgtttctcctctttcttctcttttcctctataaatgctggcctttgtctaagatcttcaactcaaaggtgtagatgccaggaaagaaaaacaaaatcaatgtattgtggtactaacaaataatgctataattattagaaaaaaacagattgaagcaagatacaaaaattctcaaaagcagctatctgtatgaaaatcttttctacttctagagagtatgtgaatgactgtatctttcatatcgtgaaagcagatgcttacatgcaatcacctttaaaaaaagaaacaaactatcacagtagtgacattgcctattttatatgagtagggaaactagccaaatagctttgggaacatttattagccttgtcctttttttttttttttaacttttagtatagagagaaaatagagatgacaggtaggtggctaagtaaggtgacaggatggcagacagcattcctatcagggcagaaagaatttataagggagctgccacttatagcgtaatagagctaagttaagaattgcaaacagagtagggccaagcaacattttaagaacaattgtccttaaacattcttgtaatgctaagtcactcatctttgtttcccacttgcttcctagagttaagaaaagttctttcctaacttgggttgctatgcagagatgtgaaatttcattggctccaaatgcttttctgtctagtagggactactgggaaccctgctaatgtgcatattgatgtaccctgtagcttcacagatgatgaaagagcatattacttatttccacaacaacaaagctaagagaaatttgaaaggagccagttattttacctggggaatttctcccaggtgatggggctatggaaccatggaatttaaatatgggggccgtcctattttctaaaaagtttttatggggagccataatatcactcccaagcagaaatcaaatcaaataaaagactattgctttcatttgcatttatttagtcaactatgcctaaaatacggaaaagatattatcatgctcattcagagtgtattttattcgttgtttactagactggactgacatgatatgatttgtgctttgcggggtcacaacaagctactagcaggacaatttgctgaatcaagaggatgattgtgtctggtgccagtcagtcgcaattaggaccaggatcagggaggcccggggcttgtgcatcgtcttgggcaagctgcatagaaatcagctcacctgaaactaattgtcacaacagagaccttatgcaaatgagccctggggttagcgtgggaaaagaaaaactgtcgcaaagataggtgacctgctgagcagggggtctgttgctggggaaatctttgttcaatgagtttaaaaatgttttcattgttcaaagtccaccccccgccccccccccccccaaaaaaagtagcatacacactcactaagagtatggcaaacacactcatctaaaattccaataaagcagaagcctgctttggagcatgccataaattgggagtctttataagggctacagcaggagaataatttccctttgcaagggcctttaaagtttaggtgctgcggattgcagtgtggcctaccttgaaaattcacttgcaaggtcaagcctattgctagcctggcaggacccgcacagccttttctccctgcattccagcaggccacctccacacagccgtgaggggtgcctgtgaactagacaagaaaggcctagtttctaattgagctttactggtatctcaggtagaagagaagggccaggagcactctcttaacacatggcaaaagaatccggggaaacaatggcagtttcttgaattgtggtttctcaaatactcacaagttcaaatgaaatgcaagcattgtgaaattccaggaatggtaatgcagcccaagtggtaatagatcataaaaatttagcaaaagaaaagtaaaaattatttttaaactatgatttactttgtttttcaatccctgacaaaaacacgtataagttggaaatgacgtttgattttattgtagcactcatttggaataatctttaatatgttttactttagaaaaccagatgaagaaaagttattcaaaggtaatgataaacatttttatacgttactgtagcaaagttgcctttgggttcttcaattgatttttagcttttcaatcttgttttcataaaaacatgggctaacatattgatacttcttagctttacactaaagatttcccagtgacatagtagataatgtatattcacacaggagtataaatataatatcaaggaaatgaaatagagtgttctaagctttagcagtaacagagagcatagatattttgcatctaatgatttcaaagaaagaataatttgaatttaaaaatgtaggtgagagaaaaagaaagtttcattgcattggcgttgaatacaaatgctattttgtttggcaaattactggacctaagaaagtgttttcattgtgtttcctaaagggctggattgaaatttggacttgtacctgataagcaagctcaggaattaacttggtagccaccacaaaacctaaagaaagttaggcttagaagtgcaacttaatcacaatttagattaaaacacacacgcatacacacacatatacaactcttttgtcccttcaccactgtctgaaataatttccacataagagacatttcacagtgggtacgaagtgctcagctttcactcatcaaactttaatcggaactgcattttagtttttgaataaagaacacttaaaaaatttagatgcaaattattttgcattattcatgctctaagtgtccttgtagatttaaacacttctgaggccaccttgattcaagtaattacctaggccctcactgctccgtcatgaataaggtattttgtacaagtaaagtatgcacccgatgagcttttaaagtggctttacactgaacttgtgtattgcttcttgtgcatgagtgagccgaacatgtgtcgcaatctgtctcaggtgggaaaccctggctgggcatccatgggtgacgggatgaaacccgagcgtctccttcacacacatgctcttcctttgtctctacctaagaatgttcctgcctgattctagtagttgttttaagcattaaaaaaaagcaatagattctaggaaaagagacagggaaagtgacagtgattccgcttaaccccttcatcaccagagattattggaaatgcccacttttcaggcctcctcatctccatcagcaaaggcttccttgtaaggtaataagtctctctcattttacatggttctgtacatctgtctccccatctgtcagcccagcatcctgagctattagagctaggtgctacctccaccacggtattcacacgaaatggagcaggcttcaaactcaaaagtagctgaagaatacttacaatggaaatgaaagtgaccatagagcatcaatctgtaagtttatccacacacacaaaaagagggtttgtaagagttaaatgtaactggctgaagcttatagctggcgtttgttacaaagtacccaagcttttcctttccaacttcgtggctttgaagaattataggaattttatgatgtgctgttggagttatactggcagagattacagtaaaggggttaaagttggtttatggtagaaaaaaaattatgcagaaaccaataaaaataaacacactcaagtagactaaacttgctgggcttttagttttacttttaacaaaggaagtttagatgaaagtaaatgttgcagcttttagaaaattagttgacactcatacttgatcatctttactatacagtggtataattaatatttaaacattctaataatgcagcttgctttgcatgcacttttcagcctcacaacattatattttatctggaattgtgctagcattttcttgggtagtgcccattttcatagagttaaatttaaaatagggtagggcctcagctcttattgccagtaaaacatcaataggagagtgaacaggtttcatacatctaccagacagtttattattaagaacaatatttatttgagataatagataatatataaattttgtttcattgccccatgaatgtttttaaatgatcagaatagattaagtttgaaagttgcatttggctgttgtccactcactgttcaaaacaggaggattttgatgatgtcaaggcagtgcgaaatcagcaagtgatacatgaaacatggaacccccatgcctgcccattcattagggcatctgattaacatagtaaggaatgtttattttcagtacataaaattgtagaactttgggagcatcttctgaattgcaaaagctgaacacccaggaacttagtgaaacaataaaaatatagagaagtaagctaatttgtgagaagcctgagctagtttattttcctatgagaagtttcttcctgttccaatctcatggctgtaggtggtagggaaaagttgtttcaggtgctgccctcagctagtccctttgaagagtgcaaggtgcccagtgttcctgatcttctagtttgaatgatgagaaagagcattctacctttccaccatcacttaagtgtcctttgaaattgaatttgcatgcacatatttactgctcattctttttaagtgagtaggtgtgctgagcttcaagtctattttgagactcagcccatgttaaccccttgaggcccacttcatgataggtactgccctgtgggaatcctgtcatttagtgaagcatgaagccataatagatccacagccataccaccattggggcatctcatttcgattaattccctgaagcctttggtgctgtggtttgcagaaatcaaatggcgcaaatgagaactacaaaattaggcaggttaaatttcgcaagaaaaaaaaaagataagtagtagaaaaaatagccagtgtaaaatattagtacacaggagcagtaagtaaactaagttccacactgaaagaaccaccagatctcgagaagtagatatcaagaaacagtttgcactggctgttttatttccttatgtcagaaggaagtaggtttttacagatccttggacatgatcatctttgtttctgatattcagaaacggaaccaacagtttggtgtctatttattttatttggtttgtttttgagaaagcgagttaaataaactcagcttacaaataattaacagcccctggactatttaaaacctgctactgaggtggtagagataagttgaatccaacagctgtcacatgtatgggtttgacagataggtaagtccaagagtggacaaattaaaagcatttttcatatgctaatctccacctgcacaggaataattttttttaaggaggcagtctactggcagagcaaattcaagagctatcagtagtacattacttctaggaattatgacatgcaataatgaataaatacttctatgagaaaagtctgctgtggaatcttaattccagatgggtgtcctgacagcaatgtgccagcaatattgtggaaagaaaaatgacatatatacatacatatatatatacacgcacatatgtatatgtatatatatggcttttaaacttgaataataatttcttccatgtgtaataggttcacaattatatctaaggaattacttttttagttgcgaatagagatcaaagtgaaaacaatagtcaaccttgcccttcaggtggcagttacatgtgagctgcatagtgagtgtgagagacagtcaaggatgtcaatcagaacctacagattaacccacagcagtgaaatctgagatggtttataacaagtagataacagtttcaggcctatgtgagaacgcataaactaaaacttcatgctgggacaaaacagggcaggacatttgaggtagagagtgagaaaaccatacttttattatgacaaagcctctcccatacttgttgaaatgtcactgggttgttattaaatgctcaccatttctctaggttttatattatcttacaaaaagcttttggagtttcctttaattttgataaacattcaaatttgtgcataatttctgcacttcagctttgaatgacagaaaatttcccatgcttgttgagtttcctttcaagtaagaaagtaattcttgtaataaataaaaatgttatatttctttcttccaatgttatcaagttaataaacccttaccttagtttataaagtcaaaatttactaatgtattgaaatgagaaccgaaatactcaaaaagaaatcttaaacatcaaataataacgagggtaatgaatgaatggtcatggttatggatggtgatgatctaatgtaaggtcctatctctttttaatagagagtcctcaggctcagacaatttagggttaaagtgcctataaccagatcagaatcctcagttattacgtagtactcttttaagacccgtgaattaagttataatcaatgattacaacactggtatcatttattaatgtacccttctcttctagggtagcagagatcagtttctgacaccttagaactcttcatgtgcaagaggaaattgaaacaataacaacatatttaggcagtaggcaaaatgatttgctttggctttacctacagggaaacttgggcaatggtcattagacttttttaatggaacttcaagtctgatgccttgtgaccaggtgctaacatggaaaagagttagcatcattgacattctttgattcggaagcacataagaggtagataaggagacaacacaggcgacccacctccaggccaggagaagaggacagttcctggaatgtctgcaatgtgttactatttttgtcacacctatgtgaggccatccatctggtctgaatcaatcagtctcatcccagggctctgctcctctcccagctgaaataatacccttctttcctcagtgctgtcttcaggaggggcgctgctcaggactgcccggacaaggccaattaatgagcctgtgtatttgcaaacgatgacccaggattagacactggagaaaactttctttaaattctctataagctctgctctcctagaaacagtacttgagaaaaccgggtgaatcattagacaaataattgaccccagaaagcgaaagactgatgctacattactttgcatacgtacatcttattttttaaagaaaatgtccttgccttgaatttaaaccatgaattggtctgctgttatacccaaagtagataaagcctgggtgtgaggcattcaccacgacttagcctgaagtattttcttcggccacttcactctcctccacgctacatgttcaatttccctgcacctctgtaacaaccctacacctctgcttctagatcatcttcttggcattcctcatgtgcacatcctgttctctagcagtcccttatccatgccgcctcatcagattcctgcacacctgacagcctcttgcttgctatttcagctactagactactgacctctattgtacatgcctgcaatcccagcactttgggaggccagggtggtaggatggcttgagcccaagaatttaagaccagcctgagcaacatagtgggaccctgtctctaccaaaaaaagaatcaaggtatgcaccagttaagccagccacgttttaggaccacatagcactcttcccacaagagacctcaaaacttaatgacattggctttggcaaattcaataccatgacataaaactactcattttccctatctgcctagttttccattgcagtgggaaataccaccctatcgtggacctcccaaccaggaaccccatggttatttttgtctcactgctgtctttctcactccccacaaccagtctgttaccaaccgttgctactttttctttgccaatgtttcctgaatccacccctttcctttccattctcatagttgtggtcttagtctaggctttggccttggcccatggggactttgcagccttctttcccctctcccaccacattcacatatcaaattccagcttactttatttaataacactgacaaatttttttttctcttgtctatgtttttggtccattcattctctctgagctccattgagactgccagctgctctctggactggcttctaatgttcacttcatacatgtcacctcttcatccagctacctcctaattgttccaatcttttttctttctttttggaggtaagctcttctggtacttctttttttatcgttctcacacttcttcagaaactcttctcatggtatacatgttcctggtacacaccactcaagggcagattctgacactttctttcggtagtccatccgtgcttcctttctgatgtagcaaagtgtcctctttgtgagcacgcccaggttcaaaacttccatttccaccacttgctacctatgacattgggcagttacctgacagcacttcacctcagcttcctcatctgtaaaatggattgttgtgacgagtaataagatcatttatttagagcactgctggcacacagtaagcactgttaacatgtttgctattagtattattatcatatctcataggactccccaatcacaccccgcttcaatcaccatcatgctgtatgccatattatccttgcatgtaaattttgaggaccacataactgggttttaaaaatctggttctaacagtagtttatgtcttagaaatcagggcaaagttaatcgaagatacctaatatcaaaccaggtaatgatgaagactttaaatgctttttgaggatgattataaagaacattatgataagaatgatgatgatatgatgatgatgatgatgatgatgatgatgaagaaaacatgaccaaatgcttctttgggttaatactctgcttataaaacgaagtgtccaggaaacatacagtattcctcctgaaattagtttttttttcccattaaatggaaacatgttatgcataagaacatatattgtgcagtatgcatgagatttatttttcagaaagcagagaaatggcaagaattttaagtgttctacatacttatttagatctcacatcaggagataaaacaaatgaaaactctgacttgttaataatttacgttttggtggaaaattcatacaagctgttaagatacctctaagacccaacacagaaaatgcaaataacatatatccactgtgcactgaagaaaatttgtctgaaaagaaaataacatcaattaaaaaaaaaaaacacaagtgatttcaagggaatgttgaccacatttacagggctgtaattgtgcttattaattttagatgtctcttttgaaatattcgtgtaaatgatctctccacttaccaggtgtttcttacagaaagtccactgggctacctcactacctaggaggtggcttacaaataggggatttctttttagaaagccacaccattacttttctctaacagcttatgcaaaagttttgtgggggagggaaaaacccaagccaaaaaaaaaaaagaaagagagagagagagaagagtgtgcatgacaataactacctctgtcccttaggtttttgttcttttcatgtcatggaactttttagctgtgctgcctgggtaactgctctggaaggttggaatatctgttgttgaaggaggtttgtgattgagggccctctgacacaaccttttgttgcattgaggtgtttgatcctctttccctttcttctaaaaccaatcccatccctttaaaaaatggataaccagcacttcttttacttattgtcagcttttggaaagttactctgggggtttgtagaagtttaactagttaactctttgcatgctgatgtcctgtcgctaaatattcttcttctttctaaacaggaaggattttaatcacttacatcaggtaactaccgctgttatgcaggcatagcaagtgaaacatattaaggtccagaaataaagcatttgtgttcaaggtcttcaaatgtgagagtgattcaggctttgcaatgagacacatccttattttctttttgtcctagaaccgaaacatgtgagagttatgactctgccacttgaaaaaacatgatgatatactaatttttcattgaagaacaacaggctttggtaataagtaaatgcaaagggttacttcagaactggggtacataactgaatggcaacaaagaaagagagccttagaatgaaaagtgtaggggtcttgttccagtctgctgactaaatgctggaatatttttttcccaaaagaagggacacaacccaggctctaggaaagaaaagaagcttaagtggattatttaacaaaaaagcaacttatggcttctagatagtgacctacattctgcacacaataatgatgttttacggtggtgatagggttaataacctaacatcattcatgtagtgttttttgaaaattgaattttactgctacaaagtaaatgtaacagccctctggagacaatattacaggcactttattgtttgctaagctgatgtcatctttctacagactgactttaaaacaaaggcagaacatttattacaaatatcactgtgtgaaaggaaatctactgaaatattgtttagaaggtgagctgataaaaaagtattaatacttggctttgatcatcttgtactataaagttatgacttcaaattttttctcatgtgatctctattcaaggcaaacttcatcctggcaattcctacctgtgtctctaacattatttgccctcaagttgaaacatttgtttaagattcatgcgtgttttaaatacatttttactctctaaggcaatttcttaacagagttgatgagtttttgagagagagagattaaatagcatctttcagagataatatatgtatgattttaaaaacaaagtatggagattaagctgtttagtttatataatgaactttcaaaatcacctgtaagtggtgactgcaaagtttgcaatttaaataagctgtttcaggcactgccaagcaagcattctgcatcacaggttgcttgcaactcagagggtttggtctctgtatctgatgcacgtgtaatacagcgtgaagttgtttgtggatcacacaggagcttcttagagcttcatttccacactataacccttgaaaatgtatcaaatgagcagatgcacttggctcttccttaaaaggcacaagtaatttgtttgtaaatcagttacctttcaagaaaagttaaattagggggaactcttgtttctttgatgttttccctcttagaaagccaaagagcaaattaatgatcattttgaagtaataatgataatgaggaaaatataatttagtgagctacactatcccaaaataactttttcaggtacagcatataaataacagcccaaaggactaaagcagcctgatggtgtttttctaagaaaatgatttactgctctgcctttgtctctgaactctggttagaaggaaaacacaggtcaaggaaattgggttaagggaaaaaaagcctgttatgggctaggtgtagaattatatgaatagtgactaattgggagtctgtagcactcagatcagtgtgtgcaatgctcagtactggctgatggtatttatatcagtcaaaaatgaagctggatacatctttgcgtgctctatgaaggcagtgtgttagttggtgaattggccgtgaccaggagaaagctaccagtagtactatgattgtgactaaaccaagaactgaactgcaatgttttaaaaatttattttactaataagtgtacttctgtatagaaaaatcatttttaaaaaaccttacaactattttgaaacattttactataagcctgcctttgatttgtttgggaagctattttatagtcactcaattcatttattgtatttgacaaatactagctacttaccatgtgccagcaccaaaggttcaaaagtgagccctcacagagccttacagattagtgtcagaaagaactgcttggcaagggtaagagtgtgacacattgtgagtattcaagaaatgtttgttgagtgactgatagaatgaattgagggatgatcaaggtaagtcctcgatttggtatatgtacaaggaggaactaagagtttccctccctgaacaggtcagaaaggacatgcttgagctggccttaaaaaatcacctgagtggcatgtagcatgtgaataatgaacaggaatgggccactggtggtagaaacagcatcccagaatatgctctgagttttagcagcacagcccatttctgacccctgcatgcctcaaagccactttaagaatttggtctttgcccttctgtcctcacccccgttgtactgtaatacacgcaaacatgtgtgtgcatgtacacacacatgcacacacacatgtgctaactccatcgttggaattcgactgtccaccccttcaagaatcaaagcatctcctaaaaaaaggaaatggcatgcctgttccttacttgtatccataaaactcacatttgagttgtctatcatgagacctcagttttttgaccaaacattgtccttaagcatcagacacataagaaaaactggaaagaggaacaggtaatatttaaatcacccactattcttgtaatgaaaggatttttcaaacatcaagatgaaatggttttatcaaattattaaagtttgctttttgtgtccgacttagcaacaagtcatggatgggacactcaaaacaggccaatttgggacagttccaactgtaggaggccttgtgtcattacctctataaatggaatcgagcttcccttcttctgcagctatacattttcttgcctttgatttcccactctgctttctctcccggcaggctcttcctgtctcctctatcagttactctataggcagatgtgcctctttttccatttgccagatccccccaacccagatcttccaaactactcccctttgaagtctctattaccgatacaatcacttttgtttcccttccatcccctctctcactgctccagtttcttctctccctaaccccattagttacatctgctgcccctaccattcagcctgtgttaaatcgtaatgcgcttgacataacttcagtttgtctgctaagtactcaatcagcacgcattgctatcttctgatttgtaggaaagggggcaagactgagtaagctggctcagaattctctgagtgattcagctctgcccaattagcacaaccaaagtgggaaattgacaactaataataatgaaagaaatgggttttagttgtgaatataaatcccacaaacttggttcctgatgcctgtggtagatactgtatgcttcatatggtggtcagatggctcagagaatgcagaagtggatgaatgaaggagagtgtgtcaataattgcaatatttattagttgactgggattctttccctggaattcattaatggattttttaaagactctgcaaaccaccagaaattgtatgtaacatttagtatattgatgcatttttttcctgggcagtgggtccatacgtttaagcagattcttaaaaggctctatgtctccccactatccgcctccaaaaaggtgaagaatcattgctataagtgaagacacctatttggtctatgttttcatgtggtctgctttttttcccagcccattttaacattccacatgatttgagcagttcagagagtagaaacgtagggttttaaaggcaaaatttaccttctttaagaggaaaaatgtttaaaccacctaccaggttatacaattcacattttaaaaattattttagttttaccacaattcaaagacaggcctttttttttttatttaacaatgggtataatcacacatctgaacataagaattagttttatgcagttccatagaaaaccaaaatcttgaggaacactttcaaaacaaccagagaaaaataaaccattccttatgtcagtcttgttagggagggattaagaaactggcaattattttggcgaccttaattgttgcgcggcaggaaaatatgtaattagagcacgttcccaggcctgcacacctgcagcacatcctacagcataatgtcagctttcagtgcctgtcggtgccaggttctagcacaaccagtcacagtgacgctctgagaacatttcggactcatgtaatgtggcttctgtgtatgaaagaagcaggcatttacactaccacacaatggagtgcattgctgcaacactggtttcattattttctgacgcctaccttcagcactgccctggtttactccgtttgaggttttattgttacggtataatagtcctgtacatttttgaaattcccttattattcagcttattaatacagtactgacttgattatcaggctgcagttgcacagcggaagattcagtgcattagctaagtcagaagctgagtaaattcttggtataatgagaacaattgtttgacatttttttatgtagaaagatgggccatggtagttctctatatagttgcattttggaattcactctatattccctatatgttgttgagtattcgtttttcatataaagaaagcttaaaatgtgttctcactaatttgaaaagtgtttcagggtatgggaggactccatcatgattctcattagcttttttcttctttttcttttattggcttttctcaacaaaaagaaactctgacgttagaaaaagtagtgaaaatgaagaaacagtatgcacgatgcctatttttcagataattccataatctggcatagtgatagttaacagacttttcccccctaagggagatacactgtattttgctatctgacatgttgtcatatataaagaaatcaattggtaattaaatgatgcaccttgtgaagatgacaaaaggcatttggttgcgaaaagagaactgggttttgaggggtttgtagtgaaggcctaatgactattcataagagattttcagtccgttgatccacttgactggaaagttctgccctggagagttagtgctgtcagtttctctcacctcagaaagccgccgcaatcgacggtgtagaggatgagcgagaaattatctagtagttgctctaggcctgtcttaggtcacgtgcagaaggcacatctggcttcctgtaggtacaacctcaggacataaactttgactaatttttaaactataaatatgtacgagtgacactgaataagttaccttttattcatatttcctttattttagaatgcatgcaagttgtgtagtaagctgccattttggccttatttttcttccaattttaactgttacacacttgcttgttaagctaagagtgactgtttatgaaagttgtcaaggaccaaatgataacagtctccttatgtgaaatccaacaactctgtgtttgctgagaatatgccaaagttgccctgcaggaagctcacctgaaacaaatacagagtatatgattggatagcgctcttggggggtgtttattgccctatttggcaaaaggcagtaagatatcaaaatgtacatacataggactggatacaaggctgccaccacatcaagatctctagaattgcagaacattgttgctccagtgtcttcataaacacaatcacaaaaactacgatgaaaattcatgcattcaaaacagaccagttactgtccaccatggaccaggcaccatcctagctttggaggagacaaacatgagggaagtaaaatctcagtgctcatagtttactgaggaacagacaaataagaaaacagttacactacaacatgtaaagagttatgattgagttgtataatagcacagagtttagaatccaggaaagggttttctgagaactgttggggtctacaaacggggtaaagatttcttatacgagctactctttccattgccaaagccaaattagctggcggaaaggtgagttggacaagtgaggtgtttctgttgcatgtggaatctcaacagaacagtagtggccagcaatttctgtacatatttactcttggaaagtgcttctccatgttatcttatcaagaagctcacctaatcaaaggtaaacacatttatcgcctcattaaggcttgttttatggccacttcgatgtcatgtttgaggtagaagtacctgtcacagtctttgtctggaatgtatgtaaaagggatttcatggacactgcagaggttttaatctttcaatatcaaaataatttaatgcataatatgtatttgagaagatgtcactggtgattcctacttgtgtactgtgtgtactgagttttgctgacacatttgctagagctgtcaaggtggaccaaatgaatggacagatgccaaaaaaacaattatgcttattaatgtacattgattgcttgtttaggttataaaacaaattaaaaaaaaccattagtatttaaacccttttatagctgagctaatgattgcttgtaatatagtgtctggtaaagaatattctataatacctgtaaagcccagctatgttatctaattagtagactttgatttaagtggctgtaattatggaattgaatagttgcctttctaaataaccaaatggtagatttaaatatataaagatgttgacttgattatttaatatttgtagcaaagacaaaccacctaaatagagagattaattccacatcagtgcaacattaaaagggagagaggatgccaagaatcccattaatttgggatataagtgtctgaaatttcctcaaaacatttacgccaaggaataccaacaagacaatatcaagcagctctccctaaggatagagaggtaaggcaaacatgattttaaactgcacaatatcacacagtaaaattaaggacaatgtgttccaccagatgctaaacacagccatttatcgagctacaaggttctagactaagtaagtgttttgtatacatattagctccatattacctccatgacctctttccccatgaagccttccctgagcctcagtatccactctttcctgtaccatgaatccatttttcttttactttttcttttctttctttcttttctctctctctcgcttgctctttctttctttctctctctgtctttctttttttgttttttgttttttgttttttgttttttgagacagggtctcactctggcacccaggctggagtgcagtggcacaatcatggttcactgcagccttgacctcacaggctcaaaccatcctcctgcattagcctcccaagtagcttggaccacaggcatgcaccaccatgcccagataatttttttttttattttttgtagagacggggtctcactatgtcacccaaactggtcttgaattcctgggctcaagtgattctcccacctcagcctcccaaagtgctgggattacaagtgtgagccactgcacccagcccatgttttcaataaagatggtgctatttgaaactatggcatgtcacgtgtatattattttatttcaccatgtgtttaaatgagataaccaggtgccaagaaagcttcaatatttgcttaaatagccaatgtgacggagaataggtaacctcttttctttttttttcttatgatttgctttggctattagttttgaaacatacatgttatattcccaattagatctcgttacatccttcacaggctgtccaaaaatttccatacttctaacaagaacttcggttgactgagtttatattatatagtttttctgtcctttgccctatttctttcaaggcctttgagtcagaagcattcagcaccacggcgtacgatagccaccatttgctttgcccttttaactttgggggttacttctgaccatagtccaactgctcagaagggctttttcacaaattgtttaccgtggcagttgctaccctattggggtttgcattcagaacccataagcagagagcaatggtgtcagtataacaaataatgtgtacaattttttaaaatgctgaatttaccaaatccccatattatgttttcacactgctctttcagaaactgtgctaatacaatactcctataaactgatcttggtcctggcaggccctgttggaactaatggggcctgacagttcttcagttaaaaattatacatgagggccactttcccttaaattatctattgtatgccagctgttcacaactgcactgcttcactttctttgcagtgctagaaatgtctaattttctcataatatccatagcaactattctcatggagggcattgaagttagtaagacttcaaacacaccttcacagaaatcatgctagagttgcagtttccattttctttaattttttggttctgaaaaatgtttagatggctcattttgccggtttcatgccatagcacttgagttatatcataatttctcatttgctgcacaactttattctatttttatgctcctaaatgacgcagctctaagtacccgtgagtggcacttccgtgctgtgagtgctatcaaaggcaacctcagatggataaaactcctggttttttgttttcttttgttttttgttttgtttttgttttgtttttgctggggaggggagaagcggagtcatcaccaagggccttcttttgtttttcaggcatgttaaaactgtataaccaacagaaccatttaaaaggaagaaaaacatcacccaagttccgtgtctgaatgaaggctgtcttctcaaatgctcctcattactccagagcagttatatttggattataattaaaacgaggcttcttttttttcttttattcttcttttttcccagaatgcctcaagtgaagtattcctcccaaagttattgcacctctttactaacaagtgctgggattttaataagcctgtcccccctccttaccctgtacagaggaaaggatggcaaagagtggctgtggtacaaaggttacatattcagtgatattttctgcttttattggtaaaaatggggaggtgggtggaggatttcctttaattatgaaataagtgtgatgttagtagttatttctgtaacctggtgaaaatgctgcatatttcaggcctaatttttagcatatgttaccacgtgtgtaataaaacggtgatctgcgctctccgaatcttttggctgttaaggagcactctgattataactagttgctgtagaaacctggtcatccagatgcttatcaagaatgcattattattttttaaaccttggtggagaagccacagactgcagcagttggacaaggtcacatatcgatggaagtgacatgtctttcctctttccattgtgtgatcgtccagggcctgggggcattaatatgcaacggttctgtttttctttcagaaggacttgtaaactctttaaacagaggcacacagttgcaattgttgcggtactgagtgggtgtatagaagctagggctgcagccttgtccagttgcagatagaataaaactgacaatgatgcaatgggcctggcatgtagacaactctgtgggatggatgaatggtgcggctctcgctgtccctccggtggtggtaggccctgtaatagctagcgtaggaagggtggtgaaaattgatatgcactattactacacgtataaaacttaacactggggccattgcacaggtggggggttcctgtttattgatttttatgagtttgttagaacatgcgcttaatgcttttatactccgggagctctgggagggctcaccttaggtaataaacctttccgtactttgcaatcgctcacaatttacatggggactcacattatccagtacaaagcccagcattccccttctacttggttttaggagtgtgataaaaaaaaaaaaagaaaaagaaaagaaaataactatagcacttactttgaattttttgaaaacctgtccactcccgctatgaaaatggcccctaattctaattactcatatttccaagaaaaattagtcacacaaacttatgttatgtgttgtctcagaggttgaaagcaaatcaggtttccaataagacagtacatcaaacaaagtagcatgttcttgatgccgatgacttttttttagaattatggttggacatttttggcagacagattgtcttttgctctatcaaaatgacagtttcttttgtaactgcaacattcataattagaaggagagaagcaatctgcccaatttaatatactaaaagaagtttagagtctctgctagtaatttcattatttttaaatttgaattaattgacttaaaataatacagttaagaagtataaccagcaggattatggagaaaggtttctttttccttaaaaaaaaacagtgctctcagtgttacacttaagatgagattgaaattttcttttttacgccaggtgccccgttctaagattcagagcagcaatgtgaatattcatccttgcagtggagctgagagaagttgtagggcaaatcctgggaacaaggtcactttaaacaaaaaagttctccaagtttcccatgcttataaggctggctgggcttaattaaagtcaatggatgaccaaaaaataaataaataaatagagagagagagaaagaaaagaaaatgaaagaacaaccacccaccccatatcagtctctttctaggcctcacttcacattgtataccttagccgttgatgttcaagctctttacatagatcaagaataatatttcttaaatcccttaacaacactgacgtgtccatggtttaatcactcttccccagtccacatctctaacctacgtcacttgggtggccctcacccacagcaccacaacaaaaacaaagccagaattgcattcagaatgaaatcatcataacatagcaaccttgttcaggatgtgacctttgggtttcagcaaccctgtcttatgcagccctggccaaccttaacctttcctgttggctcggagggtaacctttcttcatattttcttcaggatctctccttacgggacccagtatgttgcatgcctatgatgcacagggccaaaagtttcggagtgttaaaatctacgagcctgttttcctctatgagagaatgaagcctgcactcattttaaagaatacatacgtagcaagatctctttttacccttcctgtataattttggttatgcttaactctaaaggaaaccaattctctttagctctgttaccttatttcgtaccttagctgattgtcatctttacatgagcatcagatatggatgtgacaaagattttttagaaataataacgaccagtgctttatgagttgtgaagtgtttttctctcccacaagaaattacaacacaaagtgccctatgcatttttttagtatgttgataagacagcaggaaattttttaaccctcaaaactttctgattataagctgtgctctaaatttacacgggcagtgttccaagtcccacactcctttacaagtatatcattacagacctgcaagtgagaaggtaaatttccccatggcagttctgaaatctgacttcaggctaagaggccatggactgagagggctgattgtgctgggtacctacatatcaaaatctcctctagtattttagtagttccttctgtcctttttgcagccccgtgtcctacagaagtgacattttgttccattttcatttatcttactctccttagttgtatatcaaaagatatacacatttatataacccaagaagccagggattaaagcacaatatttcttaacacagcttcctctaagatctccagtagctacctaatgcttaaagcttgggctgacgtgggttatggggttatagtagctttatagatatttctatttgtgtatgctatgtttatatatgtaatacatatatgtgtggcttagggctatactgacatgttattttctatgtgttcatttattataaacagcaggcaagcagacgtttcacctcacacctcactctggtctctatcattcaaaaaatattgcaagattcccattctaaattaaatacatccgagcttacgtcttttatcaattctttattcttggtatctcaaaattctggtcttcgtcctttgtctcaaaaagggaaactgctgaaagcatttccacctggatgtttaaattatttaagttgcaggaaccagaccttttccctcctgagtagttgtgggttttaaaggctaaaattgcttcatcatgccaaagtgaaagtatgcataaattatttagttaaacctgagaaaatacagacttttcccagtgatctttcaagggctgcctacttaaatttcagaagaatgggcaagatttttttttcattctcttagaaaattgaagtatctcttgtgtcttctgtcagttggaatgtgaacaaaattacaaaatggtaatttttttaaaattccaagcttcataatatccagtatatctatatcattccaaggtgaatactgtgataatcaatcaataccaggaagactcctccagctggcgagaactgcaaaccctctctcaatgtattcttaggaaaatcaggcaacttgttataggtctttccctagtgccaacctaaagactggggggcatttccgattcaatttctagtcatccagagttggtatttcagttttaaaagtagaaagttaggtaattttaagatgttatgaaaactttgttgacatttttaatttgctttttaaatttacctttacttcagtaaataaaaataccagaaaagtgtgaagttgtgtggtggtggtggtggttggggtgtgtgtgtgtttgtgtgtgtatgtgtgtgtataagatagataatattaaagtagcaatgaaaacagcccagaaatataggcaattgaggcccaatttcaagtttctgtagcataaggcatgtatattacagaatgtaccacattatgtatctgatctctaaattcgccttagtataaatgctccaagtacattcttatgaccaagaaaagaatggtatttttaattgaatacctaacctcaaatcctgaaagaaacattaattgggacaggacaaaatgtcaacaaaaaagtacttatgtgagttatttagtatacagctgtctgttcatttgtagaatccatttgaattttatgttcagagaaattgggagatgagagtaaatatggggggagattggcatgtaaatttgttgagttttcatgaaaaaataaaaatttaaaaaaccttccaagcaaaataaaacctgttccattcacaaatgatggatgtcactgatcccattaatacctgttacataccaggtcctcttccttatatctaacttgctttttctcccaatttcagtgtagttgctcttgaccttgcctttgttcttctctcctccttctctcttctgcccaggcacagttatgtccactaaaccagatgaacaagatttcatactgacaccaccatactctgttaaatagttaaaaatcctattttggcttttgtttgctcacttagatttgtacacccaaggtgatgaagagagcacagatagaatctagagacaaatagtttctggagtcaggaatcagatccagattctaacacgaggtgatgtgggaaaaagtcagttaaaatttctgagattcaatttactcatctataaaatcatcctcataataattgctccccccttcaaaggtttgttatgaggagcaagtggaaaaatgtctattaacgggctctgctgtcagtagattaatgcataaatccaggtattattatataatcaaactgtccttttaaatgtagaagaaaagggtttttaaggcacacatgagattctggaaacgtagacgttatagaaagtctatagggactaaaaatgcattgtcttctatatgcatttatcttgccagaggtacatgcagacctttggggggtgctgctctggccaggacagtggtggagagctctgactcttgagtgtgagagctggaacgattgagaaaagacaggagggaaacttcgaggtcaggtgacttctttctaactacagcaggttctcagatccctaggctggcccaagatgagagaacagtcaccaaagagagtctggcacagtaagcctaagtctcagtgtcatctgattgtgaaatctgcttgtttgcatactcatacagtaccagagcttaagccctggccactgtacggatgactgtacaagagcagaatctaagaccaaggggttgtttttactaaggaagaaaaatttattagagttacttcaaggaaatctattagattatctcaccaaatacattaatagcatcaattattgtattttacataattttttttacaccagatacacagtatattaaagaatttgtggaagtcccccatgtgaaccagtattaaccatgataagagtaatcaggactggcccaagaaaggtagaaatgagaatttataaacttgtctaattctcattgcttgaagaaaattgaaatgaaagaatccaaaaagggatttatgaatattttttaaagcttaaaaagcccacatacttatcatcgaattgtctgcttacgataggagctggaagagtcccttatatccactcaactgtacttacattttaaatggttgttttcctttctcttacactactacaagagaaaggaaatgcctaggcaaataaactcagttaaaataactttatggttgtgacacagtttgacaaaagcaaaggaaattcagagtcactgctcacactgtatcctcagctgattccaactgtggaaaataaaatgctttaaaaaaaaaaaacaatggaacaaacttgggatggatttagtcttagtcttagaggcagccttcttaaatgctgaatctctgagttcgccatctttaagttcttataagagttgcaatatctgtattcatcataaatctagtcagagttaaagaagagtatttggttaagtactgcttggaaaatatgttgtccttttttaagattatgtgattctaactcaaagctgtaacttcttgggggttaataacctaccttgagatatactttaagtaataataatggcttcttgggattaggaaagatattaaacttacccatttccaacgatcctgtactattgcaggagagatgtggggagggagagaaagagaaagagagagagacgagagaaacattttgaccaaaattccatattcactattgctatgcaaattataaacctaacagagaggtgatgtatcatttttattaaacttatgctgcacaaatagtgtttacatagaagagtataaagttaattccctcccgggaagcatttctaaaaaatataaattgtattttgagagttaatcaatttgttttttctcttttggcattttaattgaagcttccaaaccgtatgcttcctcaaagtatcagaaggcaaatatcagtcgtgtggttataaaatcaactcttaattttctttcaatgaagtagcagatagtcagcctgtaaattttacctacattactatggagctgcagtgctataaattcaaaacagtgtgcaggttggtggaaattgaggtccaggcagcaaggcatgtccataaacttttctcaggttattggaacagaacgaatcaaaagcggttcctggttgtatgatattctcttttgatagagcaggctgcttgttgttagcaatccaagtgcagaggttagtcagagcagaatgtaatttctagcaatctgacagacctgcggattgaagcggcaggttttcccttccgatttcagggaattgcttcttactgtgacaaatgattagctgttatctctgactgaatttgatttctacaagcagctgagtcaggtaactttgcagcgtttgagggggttttttacaggaaatgaaatcggctccctagtcatatgtggaccaaatgaaatcttctctgtcagggcaaaattgtgcttttggttaattgaaggcagatttagcatagagggtgtgtgtggtgatgtgtgtgcagggtgtgtgtgtgtgatgctctgatggtgtaggcaggcacacccatgtgtgtacatttacaggaacgagggatcatttcatggattctctcccaactttgaaaatcctgggttcaaacaaaatccctacattctgagcagggttgaagcttttagaataaactataagtggagacagtcatgtgggtgtcagaataatgagccttcatataaggacatcctgtttcaaaagagtttgaactgcaatattaatcaaaacacaatagatactcactgagcatggttttcacaaaagtattcatcaaagggcagctgcattcaaagcaagagatttaggtaaaataagttaatccttgatctcatccaggtttgtgtgtaaattttgaatagggaggggttctagtgatagcaagcgtcctctggatgataaaacaaaaaacgtggcatgggaaattccaggtttatcttgtgcttcttgttcgcttttgatggaatcttaatagtgactacacaattaggatcaggtttatccttctgtttatagtttgtaattgctctggaaatcctgagtttcagtagttcaacttttagtttttaagcagtcggtgagttttttaaaaagttactatcggataatgtttcatagtttctaatcctattacagcaatgtaaaataaactgtatttcccaaatacgaagcaacatcttttattcccagacctcttactttgcaaagaggaaacaccatctttaaggtcatactagtaatactccttattttgtgatgaacataatatactttgtttataaatcctagtttaaaacaacagagatttgtggtaattgacgaagagtaaaaaagtcacaaatactgaatcttcatttttcagatgtgagcacaacattcctaggtatgtactaatatattctaacacggcattgcgctgtcatcaagacttttgtctaaatgtcaccactattatgagcaatacttttgctaaattctttagttgtattccctaaatggcagatacctttggacctctctctcattagctattaaaaagaatagttctttgaaaataacagttctgtgctccctaaacttcttttgttttttgttgagtgatgtcaacttagagttccacactgattgcccttcctccttgctttgtcgccacaaaaggggtgagggggtgccggagtttgacccacacctctggttagtattaatcacacagacatcaggtaatcacctaagtgcactcagacatactaatagaatgatttacagaccaggccctttgtgtttttctaaatctcattttaatttatttaaagtgacagtgaagctagactccaagctaatgagtctgcataaaaatgatttctttttccacctttgtgtttgctaaaactttctgactctgaaatcctgtcagtgaaaaattatttgagatgaaacactgcaaaagaaggtaaggggaaaggagacaaagaatatgatttgatcatcagagacctgccctgggtccaagtgggcctcatggtagccacaagtgtccagatcagacaaatggggacttttgcatatatgttttagtgcttcatccagacttgagtgcttcacagagtctgtgaggcaactcacatcctttggtagctaacaaattggtcctttctgaccagcaagcagtttaagaaagctaagctgtgttgtatgcgtattaaatatagcacgaactgcttggctttgcttaaccttagttgtattaacagattgtttgttttgatgactgcgccgttagcatgccagatgataaggaaatggttttggattagttaggacctataatatagaaactaaataagatgatagacttacaaggatatacatttcctgtaaaaaaaaatgaattcccttatcaggatttacttgaaaggaatatgtcttattacagaaggagaatgccttgaggaatgtgggaaagattaaaggcttttgtcagtagtttaggttgggaccaggtttcctgtgtagccagcccccctgtccccacgtaaatgttttgcttttcctcctctctctctttctctttaaggggaagagtaagcccttctcgctgcctggcggtgtcagattaaataccgagatggcgacaggaaaaaggctggaaggaaaaacaaaagacaggggggtgagagttatcaggttggcgacggaactgcaggcttgtcggactccaatttacagaaatccaaacagattttagttgacacgatctgcaatcattaccgccggagcagagctaattaagaaattagctttcctgattgcctgttctcacagtgatgagtagttgaataatgttgtatggctgaaatgttctaaaaccagacagtttaacaagtgtttagccttttgtggtgatgctgtatttactttatctataatatctgtgctgcatcactatttgtttcctctccttagaagcaccccttgactttttttttccttttccttggttcaccctcttcttcttggcattaagtcagagcttccccccttacttcagccgcgtataggagagaattatcatacagatttgtggcatgtggtacagaaaagttatcggaaacttgtggcacattcaaaagcatatttcctacccgtctaggcatttttcacaagaaaatatcaggtccaaagtggcatttgaagtttctgaatctgactaaatgcagaggtgattgtgaataaataacattaaaaggctttagtcagcaaagatacagtacgagtgagtggagctcattagaaactagccgtggaccccagatatgtcaaaggggggtttgctgagaggtgaccacgcagtcttcataacttcctcatctctcccacaactatcaaacacataggaagatgttatttggagaaaaaaaatagttatgtttaaaaagcttgacaaagaaattaatcaaaatgagcttcatggaccttgtaaaatatggtccaggcacatgtaatgcatatgtaataggcatgcgtaccgatgtgtccatatggacaaatagaaaacccaagagttaaaagtttctgcaaaaagacaacaacttctttccaaattaaatagaaggcttatttgaatataaactttctcgcaatacagcaaaataacaaagattggacaaaggtttccaggtgtcactgttgaaactgcaatgggaggtaagagtattgctagcttcccaaatgaaccacagaaggggaagttgcatcattcaagatgcttatcctttaggatttccaagttttaaaatgtaaatattcatctatggaaaaaccaaaatttccaagttttcctagtacaccttcaaatcatttctacacctaagaaaaataaatactaatttttcttaatgaggcctaataacacctttaacttaccattttaagagacgctaagtcaatacaatgtgcaggtcccttctggatatttattttcctaagcacaaattcatttataccgaaaaaacagtggatgaaatactagaaaaatcttttctgcactggacctctcttttccagatttacctaagagaatcttaccaggaatggagatagacttttacttcctaagtagatttaaatttaacaccaatttattcactctagtatttctatatgggaactaacagcttctataggacctctacaaagtgccagaaatatgatctcatgtgtagtaataaatttaaatgtgttttcttttacatattctatccctccgtattttcccaatctcttccttttttatgactcccccactctcagtttctaaaatcacttgtccactccggagacccaggggcactgcctagagaaggagctaactttaaaaaaaataaaccaggctggtcacagtggctgatgcctgtaatcccagcgctttgggaggccaaggcaggcggatcacctgaggtcaggagtttgagaccagcctggccaacacatggtgaaaccccatctctactaagaatacaaaaattaaccaggcgtggtggtgggcgcctgtaatcccagctactcgggaagctgaggcaggagaattgcttgaacccgggaggcggaggttgcagtgaaccaaggtcatgccactgcactccagcctgggtgactgagtgagactccagctcaaaaacaaaacaaaacaaaaaaagcaccatactcagagctgctataagtaacatgcagttgtaagccacacacttctttgcatgattcttattttaaagattggaaagtagaattcgtatttgtttgttgtactaattccagtggtatacctggaattaataaatggtactaagacactaaggcgttactttcttgcattattctaaatcagagtgttgattagagagaataatccaaaggtaaaatagtcagataatttatttttatgtaagtttaaaaagagaaagagattgatttttttgaagagttataattacattcagtatgtaccttttgtgcattgaaataattttagattttctgaaaaggaaatattgatgtaattcagctctcaaaacacttgatgccatgcctttcttcctagtgtttatgtaaaagcaagtggtcaattgtcgctgcatcagagctatgacaagttcttctatattaggtgggcatcactcaaacacttttccatagtagatccagtggtatacctggaattaatacaatttattaagtactaagctatgttgtatttattgtattaattccagtggtaatacaattccagtggtaatacaatgtattaattccaggtatacctaccactggaattaatacaataaatacaacatagcttactactcaagtctattacacgccatctaaaatagctaatcagaaaggctgtatgtctgaaacacccaaaagtcactcatcctctttcttaaagcattaaaagttttggcaacttttctgaatccgagttgtgtgagtcctatactgtactaagctggacatcttaagggctgcaggttttaatatttacactgccccgactcagttggtaaccgctagcaaatcatctcaccccagtttttgtccttttcctgaagaaagctgaatttggtttcatgatcactgtttgctgaagaagacagtcccaacaatggtccaaagcaaggccagcttttaaaacagccaccaactctgagtcaaggcatctaccttcattctaatcaagaagggaagatacaaagtttcaagaccagtcttcaccttgcactgaatctgacggggtcttactcagccactttccactacctttcaacctaaaagccaagaaaagcaaggatttggattttaaagctgtacttgttataggtgttcatgggttttgttagcattgttgttttttagggatgaggggtgttactggagtggaagggggagctgtgttgcttttagtttgtcatttaggatgttaaagttagtatgggtttcagtttgcattttaaaaattagaatggtaatgagcaaggtgccagaaggaaataacaaagcacattttcctgaatagctccccctgtcttctgtgttcagattctactctgacttcccaacccggcttcctctcccgcctgctcccttctgaggtgcagtgtagaagttcattctcaggtttctctcagtttgcaggacgagatgctgccggccaggccaagggcagttatgccagctcagtgtagtgcagcttccttgccccagcgtgcgcaggctgaaagctcagccagtttctctttctgaggctgcttcacgtcttctcagggatttccaaggcacggacgttcatttgcctaaaactctcttaaactgcctgacaaaaaaaataagtacctaagtacgacataagtggtacacccacgcaggataattaggattgatgtgctcttttagaggcaccagatcctcaacctccccttactagtggcatttctcacctgctcatgtggtgcccacctgtggcttgctggcattgccactgcctgcgagtggggagatttccaagttcaaaatgaaggcctgattttacatggtggaacgctgtaggactgtgtggagctctgtgaaggaattaaggatggcatgaagtcctagtttatgtcactgctcccttgtttatgttctttccttgactattcccacgccccctctccagattttgcatggcttttatagcctctagtaattatatcagcagcatggagtctatttttatctcttctgaatgtgtgcaacgtaaatgtcaaaaaccataaaggccctttttagcatgtaccttgcatgcacagtttgaaaagtgtgatgcagcgttcagagagatgttgcattttgaggtgagacagatgaaaagtggaaaactcaatttcaccacttagctgcgtgaactttcagtaagtcctttatcatcttgaacgtttagcattttcttctgtaaaatggagtccggctgcctacctcatagggtggcagcatggaacctagtttagtgtctgggatgccccctttccacagcaggtgcccccaaactcctaaattatatatttcatgcttaaatgtcatgacctttcaatgccctgcattgccctttatccaacttagaaacggagtaaaaataaaatcttaccactgtaagtcacaataggattgtcacaaaattagcatgtgaaagaatgatacggaactcactgtcaccaaaaaactgtccctagacttggctaataattataataatacctagcatttattactaagcactttctgggagctggtctctaggtgctttacatgtaaccttcacaaccatccactgacccagtggatagatattcttgtcctccacttaataaaggaggacatggaggcaggttagataacttaacaaaagtcacaagttaggaagttagtcagctggattcaaattgaagcatcctgatcccagaacctacagaaatataaaatgtctatcaggcaggagcattcacatggctgagctgccccagcttctaggcaaggttgtttcctctctttgcacttcctatttgaagttgggccctgaaagcggctagatgggcccgtcagaagggcatgcgaagctgcagtcccttactcagctacgagttagggaccatcatgcttcaaaggggaaatggcctcagcatgtttaggtagtccagtaccatggtacagtttttatggctcattaatttatctttaattgaagataagttgggagaatttagagttgtgagaaaatgtgttgttttctagtcaaaaattctcctgtagttgtgatgaatggacaagatgggagtaactgggggatgtggtaagggataataataaataataaagagcatatttgtaggccctcaacaaaatctagtgatggaaggaagaacatatataggcatgttagacatatgagaaatatcataatacattttatgggtaagctaagaagaaccagttatgcaaattttctctacttttttatgaactacttattgattaccccagtcatttttccattgctaccactgcataaagcagaggaagccagtgcagtcagaaccctcttatttatacagtaaaggctattaccgaccaagtacttagcagccagagaaatcttgcgtgtaaaacagaactgggatctgaagaacttagaatatgtcatttaaagaaatatgatcactggtatgtactaaagtgctccaactttttaaaaactttaaaatcagttgactgaaatttacagttattaaacttaattcttttttttttttttttttgaaacagtgtctcactctgtcacccaggctggagtgccgtggcgcgatctcagctcactgcaacctccatctcttgggttcaagcaattctcccacctcagcctccccagtagttgggactacaggtgcaggccaccatgcccggctaatttttgtaatttttggtagagatggggtttcaccatgttggccaggctggtctcgaactcctgacctcaggtaatccgcctgcctcagcctcccaaagtgctgggattacaggtgtgagccaccgcgtccagccaattgttagtctttggtacggtgcccatgagtcatcaaactcatatgtggaagtttttgaaagaagaaaaaaaaatgagagtagattgattaatgactattaaaaatagcctgggatctacgaatacccatagtaaagagcaccaggcactggatagataattggtctaaagagcctggaccttgctgaagataatatatacatgtaacatgttttgtgaaaatggagtcctgaagatgaaaggtgtatcttttccatattgactacgtgacttaattgctcacttactaggctgagaaaggggagcagaggggatgtggagagggaagaaggagggaaggaaggaaagaaggaaggaaggatagagggaggaagcaaggaagggagggagaaaagaagggaggaaggaaggatgtggaaggacggaaagaggggaaaggatgattcaatatcctttgactactaacatatggcctatttggggaagtagacgatggtgcatggagtctcctgaaagcatcatatgaatgtttgaaaatgttattgcccacacagtgcaagtgcatttaggtatgttttaagataggtgggctaactctgaactagggattcccaagtttaactgccttatgaaggttagaatttgagcacttaagttcagggaaggaaggaaggaagggggagagagaagaagggagacggcactgcaggtagagtatccccacatgtcttacctcttctgaaaggctgatgcaacaaatgcgactgaaaagccaaagtatggatacgttttcaatttatttctaaagagttcaatttaataactgtctgagactgaaaccattgacacagcagagcttctagtaattataattctgagattccccaaagtggaaagtcctaggaatactgcctgaaatgacagtgcatttgctgttcaggtaaaattctttaggaattttctctgattctgatttctatttctaaaattttcgatcatcttcaccattttcccccaaaaaatgaggggtgcatttctgtcattttgtgtgtggttgggtggtattgttgcgtctcagttaggggttgtgaaatggaagctctggagggaggaaaggcattcttggtttgcaactgagagcaaaaggtaccacctaagcatcttctgtgagactagggtgcttcctttagataaatgtgtatctgtaatcagcttaactaagcaggtaaggtgttcattagctaggcagggttttcaaagagagagagagggagagtgagaggaagagagagagaatgaatgtggaagagtgagaagaacaaacaagtcaaagcatttgttcatgctgcaatctacacatcaattatcccgctgtgctaattaccacctttccataccccaggtacctaagcattcacacttactcactttcatgcctctgatcaaaaaaaaaaaaaaaaaaaaagaggaggaaagaaatgatagaagcaggggatgatgaacccagaggagaaatacattcttagatcaaaatttcctttacatatgaaagtataaataaggggtcttctccatcttgccattgttgttttagacaattaaatatttgcaaatgttttaattgcaaaatattacttactgtcaggcttccaggagtgcttccatctcatcagcccttgtttccatacttaaaagaagacagagaggtgagaattgctggtcttgcctgagattttggggttgtgccattagaatgagatcagatcattaaaagtcagtgactactaattatcaggctacttttctgaggctattcaagaattgggcagtgaggagccagagagctacctttgtatcaaaaccttggtgttccccctcaccgactgaaccttcatctaacaattaaacattctttattatgatgaaatctgggcttggaatccctgttggtttgtgggcttccttgtcagggtgctcattttctcatttcagagtgaagttggataaaaagaaaacctatttcctgtagctcatttgatacctggtggggatgctattcaggtgacaaggatacaggcacagagggggaacagatgtgatttacacactcattatcatttgaatgaaagtgcagataggcctgttcaggggcctgggcatcacctggacagctttccttctgatctttatcccatctgagaggccaggtccccctgacatctttaaatccccgacccccagctggtgacacacagagttttatgacagtcagcagtcctctgaagctccaagcacagatgccattcagaattgtgcttcacactgtttttttcattgtgttcaggcttaatcaggaatatatccaaaaaaagcttaacttgaataatttcttttggtacttctccagaaacctgtttgccactcgaagtttgtgtatagtattctaaagggcctcagattttgtgttcttaaagttatgtgcatacgtagctgcttcagctttcgaaaaaggacaacaaaatggaaaggaccataagttatagatgtcatcaaagtcttatgtttctacgactatcagatcagatgagcttagtattgtggtagatgcagtcagaatgttagagtgcaaagacaatagaaagtttggatgaagctaccaaaaagaaaagtttctgtttggcctcttttgctcttcataaaggattttcagcgtctttgttttgctacctggaatggctgctgtcaccatgatctctcaagcattttgttacttatttgtgggatgtgtgaataacatggaaaaattgctatgtcatctgaagacctcaaatgatgagtcctgaacagtacaaactgtttttttttttttaaatacattttcaagaaagcttgctttcgttcaggacaagaatgcacaacaaccttgaataactttgtttttaaccttcccttatctcaggcagcctgacagttttggtggggagcgaaaagtgaaaggaatctgtgagaacaaatactgtggtgtttcatgattttaattaggtattgtattaaagagaaaaatataatgaacacaagcacatacacattttatttcccatctaacattaacagttaaagaaaacaatcactatcaaattactttgttacagtccataattacaactcaggttacgcttaactgttattaacagaatgtacagtaatatgttctggcatcgtaatatgttattgtagcattataattaatcttacaggaagtataataaatttacagtatcagattgaagcaatactgcatatagatttattaatgcttttaatcagttctggcaaaattaattttgcactgattgcttacattggaatttgcatatacttagtgaaagtaatttattttttatggattcctttttattaaaatagggcatatggccctttagctaaaaaactttgtggattctttagctaaaaacatttctaaacattttgaaatgccatatatcttccctttaagataattctttctcttaagatttatttttaaattatattctttaaaatacttttttaactcttatttcaatgatctattttttgaaactgtaatatttatttccctattgtcattagcctacttttccccaaggatctaagtttgaataaaaacacaggccttgaaaaatatctacattgataagggactgcattaacatttcagaaagtgtcatgtgaaaattaaatatcattgaaaaataatgaaattttactctttgaaaagtccagtaaaaatgggacagcacatgagaattttgccattatttctaagtgcaactatgttacaatactccaaaatgctttctgtgccacgcaatgtatgtgcagaaaaaaggcgagtgcagattttttaaaaaaacttaaactgatatcagtgttgtaagttcaaaaatagtattgagaaaaatatacctaaagtgtctttctattaaaatatacatgctttgtaaggaaaggtaaattattcaccaaaaaaaatcaagatgtcttcataaaatatatgtttactatatcttaacttgtcaggcaatttgaaattttgaataaactcatcacttaaatctttattttacctctttcaaaaatagtaaattaggtgttcctgtaggtattgattaatttattttgcaaaaaatatttgaagaataagggaagagtgatttcttattcttataagtcttaacaataaatatgttccttggcttgaaaattgagtgagcctaacagtacatagctttcttttcctatgttagtgagttacattatgtaaagcatattcatgaacttatatagattctgggtagttctgatgatatgaaactaaattttttaaataatttaactgaatattttgatattgcttgtatcaggaatttcttcactaaaagagcatatatgcaacagtgtgacctctttgggctcaatacaaaagtgatttgtacagtgattctgtgattttccaccataataaattgagaaaggcaggtcttggtaaaactttatagtcatgtatgaatacccatattcaggtcttcacctccaagagacattcattttaatttatgtcgttgtttatcatcaaggaagattttgaacttttgagaattggcctttatctgtcctaaacctctaacattccactgtatcttaatgaaacggaggttctgttctttctgcccagggcttctgataagtgtttgcagactatgtaaacttctgaataataactttcagtaaggcaggagtcttaaacctcttagtatcattttgtgcagtattattctgctctgtaagataatgtgttatcaatacttcataagataactttggccagagaatgaataaaatttatagtcactttcaaactgctccctttttttagggtgtgggtcatagatcatgcagctgtctgccaacagataatcttgatgagtaaaaagaagctaacagagaaaaaggtggcttagtctaaaacacttaggaaggacttaaaaaattatttcccaaagaattagggagtaaaaaaattgtaagtacatttgtttacagtaaaagagtggtctctttgtttgaggaattttccttgccacctcagaaagtgaaaatttactccttttttttttttttttttagaaaattaatgctggtgtgattgtttaacttgtgtaacctgttccttgaggtaaaatgaggaagaagcatatgatttggcctctcttttcagtgaaggaaggaagtccatggaaattactgaaccaaactagagatctaaagcaaaagcccttttgtgacacagatgaactcaatagtgcactgtgactatctgacttttgccacgtccaggcttaggccgccaagcggccagggtcagcaaattccactacctgaaaatgacagaaggcggcagggaaggggaattgaggcatggggagaagcagttgaagcatactagggaggcatgaggttctctctctctctctctctctctctctctctctctctctctctcgtgcagctaaaggaagagaaggaaggaaaagagggtgatcattgaacgactttaggggcaagtctggagttaggcgctgtggtgtccaagcagagccgtgtctggtggcggcaaactagattgctccaagcatggagcgccctgcttgaggacacttgttgttggactgtttgtttacatgcagtttgggtggcaaaaaaaggggaaagtctgggtgacatcagctgcaagaagacttaaccatatgccgatgtcatccaacccccaattatttgaacattgtgaaggttaagacatcaatccatccatttttctttctcttactctgaatcgtgacattattttctctagttcattgaccttgttggcaatttacaccaccaatataagcctcaggatccttttgtaaaatgagacttgacactaaattagtcaactaaaaatttaaagggtaaagggtccccccagccacccactcctgcccctccctgtactaaagtagaaaatttggacaaggcacaccatgcgtgtgactcaattgttctggccaaaaaatgggatgaataattttatttcatagatgcttggtgattactggactttacaaaagttaaccactagttaaaaaaaaaaaaaaaaaaaaaaaaaaatatatatatatatatatatatatatatatactgcttttgggtactgaggttgaacaattggtcggggataattccataaaatggatttaagtatttaacaaataatgtaaatgtatagagcaggcctaaaatttctccactgcctttgagtatacctttagaagtttacaaatacatgaggataaagcagtttcaataaaatgatcaattgtacaaagtatagaaatataccaagcgtctcttaagtaaatgattacaacatttagaagtattcatgagtttgacatatgcaaagcagcctatctctcatgagtctgagttccagcctccctgaacctttgtgcatttcataggctggtgaacagcccaaacatgtaaataaatagccattcaaagtgcaagcatttttaaaagtttaaaactccacacaagttcttttacaaaagagtccacccttttatgtacctttaaaaacatttagccactttattcttttgtgtctttgaagagaaaaaaaattaataaagttgtaggatccttttgaatttagaaaatgttggcaatgttggaaagaaagacattcagcatttcaaagttctggtggggaaggaaaaaaaagattctgaataaaacaattttatgtgattttgcaggtggtttgagctatcattttatatgtacgtttgtaccactgctcattggaatgttcatataatactgacctaattatgcatagaaaaagataagccatttacttgattcatttcttctttttaaatcaagaaaggaacaaaaaggctcctattttctgaaagaaattgttcgcttttattgcagaaaagtagcagcttgtgcagagctagaactgtaacaattttatattccaaaggttttgtgtgtattcggttagttacagtaattatacccaataactgacagccaaaatcacgtaggagaaagcaaaggctgttttctcacacaggccctgctgcagaacatctgctgagagatttgcatattaattaacccatattaactctaattattctgggaaattatcaaataaattgaattttctaattttaacctttcttttacttgacgcgtgtcgaggctgagaggacgcaccaggccgtctcacctgggcaatgagcaaaagatcttttctaccccttttgctcctttagacctggggcagcctggggagcttttgtgtgccttgtgcttttttggcttctgtgcctggtagggtctccatgcatttgttgagagagggaacatgtgtgcttgtgagcacagatggtggatttatacaggggtgaggaaaggtggtacctcagaacagttgagcaaaccttaagtttttttttttttttttttttcttcctcccagcctgttgtttaggcctgagcaaataaatgggagtttaattcaattagagcctggctgtagtcagtgcctcatgacagaaattattcaatatttttcccctcacattgtttggtttacacatcactgactcccttccttttgtactctgtttagagtggccataatgtgttgagcttttgtgtctgccatgtcactgtccctttcaccgttgtctggttttgtcaattgtgaggtgcaatgatgctgttttgaaaacagggtcctagtcagggtgttgctatgtgagtagggtggctgcagttttaaacatactacacagtaaataatgtcattagcccaatagacctgaatctactgctaagccttaagagaaatcctttgggtagggaagtgaactttacatgcctttctcaggtattagatgtagcttaaaactgagatttcaaagataaatctggtcagggcagtatgaagaattggactccattgcatgatcccctttcaggcatttctttggggtaagaggcaagattgactgagattagaattttttgcatgtgatcaagtttgtaacgacccatactttaagccacagcgatcaggagaaagctactgatgaaacctctaccacaagcagatctccagcccccctacttcgagccacatctcttctaaagacctatgactctatttccccctcaatgatttcacttctccccatccactaagatctattaagatgagccacacctcttgctaccttgaaggtaattgttttcctctggaagagctgttctttcccattatttcagctgatggagtagaagcattacggtacctccatgtaacattccttagactcaagaattattattgacttcagtaaactgcagaaaaccaagaaagtcaccaaataggtctgttggatggacaaatatttgaaagcaattatttttatggataggctagaactccagtctcctttttcatggaagcatggaatgccttttgcaagaaaaatatttctttaagagacaagctgttgctacttcagatgaaggtatgggttcatgctaaggtttttgaggggaggtggtttaatttcgtgggactacaatagctaaaagtgtatttcagttatatctgtatcttagaaaaatgtacagttacagacaaggtttagggtggggcaactaaaacaatcagagaaaatttttatagtttttctatttcgtgtttattttttacagcacattccaacgtactctggcagttactgactttacaccttttatgggctttgaaagttgtgtaaccttttcagaggaaggtgatagacacaatatctatttacacaaggacacatttcccctttctttatattccgtttattcaaggttttatttccaaggtcttattactataaaacttaaagctagacaaggtctgccctcatgtcagataaaaaaaaataccaaaacaattttgatggctcagaagcttattttttcatacttccaggtcctaaataaattacagttattttcacattcctcttgaatatccttcaggcatgatagtgagcatattttttctgtaaagccccttaatactttccttctgatggtttgtatagagcaagttgttgaatgatcgtggattccaataattagagagagtcttctaaaatctttttttccttttgacatattgttggaagacatatagtcacttgatgtatttatgaaagtctgtggaattattggcagtagatgtacaatatatatgaaattatttgtgtatagcagttgttttgggggtcttccctcagcatgccatcatgctaggcttgctgatgaaggtgctgttagactttttagccatcaaagggcattattgacttgtgttctggaatatagctaagtattatgtccttggattgtaagcatattatagatgttgacagaaagtgaagctgaaaaaatttctaaaggatagaaataactacaaaaactcactaaatgaaaggagcggtcaggggcctgtatgtttgaaacatcaatacaatgactagtttcctttggtaggagttaagtaaggtaatcaaaaccattatgagtcctagatatacaggaaaacccgaatatgtttacttttgtaaaaaaataaacagatgtcaagtctttgggaaatcataaatttcactgagaacactgtgacctagaaataccgtgtcttcttgaaagaaagtgaatttactgttacaaattcttcgaccaatatctgtttttaggatagcttgacaaagggagggtccttgcttttattcttatttgccattatgtttatatttttgatattaaggaagaggtttggaggggaaaattacatatctaagatgttattacctgcatgttggagcctatccagaacctcaacaaatgtatggaaatttgaacctttttgaaaatcaccagcatactgaaatttgaaaacctctcccaggtaccagggaacctgctaatatttccagagggaatgagtggctgccatcttcccaagatgctcctgtaaccaggaagttggaggagcctcagaactggcctctctccactgcaaccatggcattgcagaaattctgctctcattttatttaatatgcgtatttttttacatagctaatctgaaatggaaacatttttatccctatactgagaactgcttttgttttatcagctgacattttacaactcattaatttataatgcaggtttaatgccttcgaatgttcctgggataaaaaattaaagtggccaagctagtttgtataaaggctgactatagtatgttaacaataattatttataacaatattttgtattggatagcacattccatctgaatatttcaaattggcatggtcccttctaactggcattaattcattcatcttgcatccccaagtaataaagttattcccatttttaaatggagaaatcaagattcatgcatttcagtgacagatgttcaaattcagaagaaaatctctgtttgagtttgtctttgccttgtaatacgtatttgtcactaggcctccattattaaataagaaattgaaccttgcatttagtcctatgatctttacccacccaagcacggaggtaacaaggtaactgtgatttaaaaaaaaaaaaaaagtcaatgataaatccccccggatgggcaagagtcactggacaaaaattattgaaaaatagctgcatcctctcctcagtagcacatacttggaaattgaaattttgtggggaagacaaggaggaataaaggctaaggttcaggagaaaagtcttagaaggtcttcccgacacttgccacatgtaaagacgttgtaagaaagcaggcccacaaggcctttaatccactggctcaaacataaatgatctctaagcatgtaagcataagagatttaggaaaccaaatgattcataaaattccaaaacacttcttttttttttttttttttaaagacagggtctcattctgttgcccaggctggagtgcagtggtgtgatcatagctcactacagcctcgacctcccaaactcaaacaatcctcctacctcaacctcctgagtgactgggactattggcatgcaacaccatacctgactgattttttatttcttgtagagatggggtcttgcccaggctgatcacaaactcctgacctcaagaaattctccctgcttggcctcccaaagtgttgggattacaggtgtgagccaccatacctggccaaaaggacttattttaaatttgaagtcatattaccagcagagacatttttaaaatgaggttacatgtctgtgtcacgtctaagctgaaggattaggcatggtctctctcatcatggccttcctacttgaggaagcatttgcaaataaatttctaagtgaagggccaacacaaaaattgtgactggcacaagttcaaatcttcctttttcctcgtagccaccacacattgcagcaccagagaaaagacaacagacactgaaacaatggtatttcagtgattataccagttacatcaccttgcatttccatgttactgttttatacatcacacagtgccattgcacatacaactttgtaggctcctatgacaacctcataaacagggaaccattatcatgatttttactcatttctaccaagcttccttggatgataggccaaggccacacagctggttacacgttggttctgggacaaggcaagtcttcaagctcataattctgtgaactgcctctttatctctattgtttccaaactattgcaggaaacatgggtgtattgttagattctggtaattgatcaaattggtaggcttctataactcaaattaaggggatccatgaaagtaacaatcatcaaaacaatttaaaattaagcaacaatctccatttttgtggcatgaaaatcccaaaaagtcccagggatttccatcccttactctggtcatgtggggtttaaacttagattgcattctgcactgggaatttgtattatcatgtatgtttttgtttggctgttgtacacctaaagacatgctttctggtaccggctttgctaccaactagctgtacggcctttgacaagccatttgacctcactgtgcctgtattacctcctttgtcaaagagttgacttcaagtgtccttctggaactacaattttgtgattatatttctccaaataaattgtaagcttcctgaggtgagaatggcacttccttctatcttctggatttgccacattgtgggtatttaataaatgtttgatgatggcattgaacgatttattggcacgcttgagtagagttataggaaatcattattggctgccttattaacaattagctgtctataagctgcatatgtaattttcctttacatcaatagagtttctgcttctggtgaagacgaagtattgccccttcacatcagttcttctgtatgttaatacattagcaactgatatcttatttgtactgtaactgacagaataatgtagagaaagcatataagtaggaaaaggggttagtaaggtaacattgtatagggcatcttcaaaacaacagttctgctatttcaaatgtcaagctaattatcagcaatgtttaaatgctatgataggccatttttgcaaatgctgaaattttccagcaggtatggacgttataaaaatgtcaaattttgctactattctattacatgtcaccagaacacaaaaatctgaaaataaaagttatatgtataggcaaggaagagaaaccattatttgttttgcatatgactgtaaaattaattggcatagtgatataatttagagtattgtttacttggaaggaagagtagagaggatttaatata

SEQ ID NO: 215 - DNA, 5523 bp, Homo sapiens
ggcgatcacgttttcacatgatgctcacgctcagggcgcttcaattatccctccccacaaagataggtggcgcgtgtttcagggtctctcgtctctctcctacagaaaagaaaaagaaaaaaatgtcattagaagaggcgtaacacgtcagtccgtccccaggtttgtgtttcctggagtggccgaaagagatcagttctaacctgctctgcaggaataacggtcctgcctcccgacactcttggcgaggtttttgtacagtttgctccgggagctgtttcttcgcttccacctttttctcccccacacttcgcggcttcttcatgctttttcttctcaccatttctggccaaaactacaaacaagacttcgcagatcgagcctgcgtgctgccgaagcagggcgccgagtccatgcgaactgccatctgatccgctcttatcaatgaagcagccgatcatggcggatggcccccggtgcaagaggcgcaaacaagccaatcccaggaggaaaaacgtggtgaactatgacaatgtagtggacacaggttctgaaacagatgaggaagacaagcttcatattgctgaggatgacggtattgccaaccctctggaccaggagacgagtccagctagtgtgcccaaccatgagtcctccccacacgtgagccaagctctgttgccaagagaggaagaggaagatgaaataagggagggtggagtggaacacccctggcacaacaacgagattctacaagcctctgtagatggtccagaagaaatgaaggaagactatgacactatggggccagaagccacgatccagaccgcaattaacaatggtacagtgaagaatgcaaattgcacatcagattttgaggaatactttgccaaaagaaaactggaggaacgcgatggtcatgcagtcagcatcgaggagtaccttcagcgcagtgacacagccattatttacccagaagcccctgaggagctgtctcgccttggcacgccagaggccaatgggcaagaagaaaatgacctgccacctggaactccagatgcttttgcccaactgctgacctgcccctactgcgaccggggctacaagcgcttgacatcactgaaggagcacatcaagtaccgccacgagaagaatgaagagaacttttcctgccctctctgtagctacacgtttgcctaccgcacccagctcgagcggcatatggtgacacacaagccagggacagatcagcaccaaatgctaacccaaggagcaggtaatcgcaagttcaaatgcacagagtgtggcaaggccttcaaatataaacaccatctgaaagaacacctgcgaattcacagtggtgaaaaaccttacgagtgcccaaactgcaagaaacgtttctcccattctggttcctacagttcgcacatcagcagcaagaaatgtattggtttaatctctgtaaatggccgaatgagaaacaatatcaagacgggttcttcccctaattctgtttcttcttctcctactaattcagccattacccagttaagaaacaagttggagaatggaaaaccacttagtatgtctgaacagacaggcttacttaaaattaaaacagaaccactagacttcaatgactataaagttcttatggctacacacgggtttagtggcactagtccctttatgaatggtgggcttggagccaccagccctttaggagttcatccatctgctcagagtccaatgcagcacttaggtgtagggatggaagcccctttacttgggtttcccaccatgaatagtaatttaagtgaggtacaaaaggttctacagattgtggacaatactgtttccaggcaaaaaatggactgcaaggctgaagaaatttcaaagttgaaaggttatcacatgaaggatccatgctctcaacctgaggaacaaggagttacttctcctaatattccgcctgtcggtcttccggtagtgagtcataatggtgccactaaaagtattattgactatacgttggaaaaagtcaatgaagccaaagcttgcctccagagcttgactactgactcaaggagacagatcagtaatataaagaaagagaagctacgtactttaatagatttggtcactgatgacaaaatgattgagaaccacaacatatccactccattttcatgccagttctgtaaagaaagttttcctggccccatccctttgcatcagcatgaacgttacctttgtaagatgaatgaagagatcaaggcggtcctgcagcctcatgaaaacatagtccccaacaaagccggagtttttgttgataataaagccctcctcttgtcatctgtactttctgagaaaggaatgacaagccccatcaacccatacaaggaccacatgtctgtactcaaagcatactatgctatgaacatggagcccaactccgatgaactgctgaaaatttccattgctgtgggccttcctcaggaatttgtgaaggaatggtttgaacaacgaaaagtctaccagtactcaaattccaggtccccatccctggaaagaagctccaagccgttagctcccaacagtaaccctcccacaaaagactctttattacccaggtctcctgtaaaacctatggactccataacatcaccatctatagcagaactccacaacagtgttacgaattgtgatcctcctctcaggctaacaaaaccttcccattttaccaatattaaaccagttgaaaaattggaccactccaggagtaatactccttctcccttaaatctttcctccacatcttctaaaaactcccacagtagttcatacactccaaacagcttctcttctgaggagctccaggctgagcctttagacttgtcattaccaaaacaaatgaaagaacccaaaagtattatagccacaaagaacaaaacaaaagctagtagcatcagtttagatcataacagtgtttcttcctcatctgaaaactcagatgagcctctgaacttgacttttatcaagaaggaattttcaaattcaaataatctggacaacaaaagcactaacccagtgttcagcatgaacccatttagtgccaaacctttatacacagctcttccacctcaaagcgcatttccccctgctactttcatgccaccagtccagaccagtattcctgggctacgaccatacccaggactggatcagatgagcttcctaccacatatggcctacacctacccaactggagcagctacttttgctgatatgcagcaaaggagaaagtaccagcggaaacaaggatttcagggagaattgcttgatggagcacaagactacatgtcaggcctagatgatatgacagactccgactcctgtctgtctcgcaaaaagatcaagaagacagagagtggcatgtatgcatgtgacttatgtgacaagacattccagaaaagcagttcccttctgcgacataaatacgaacacacaggaaaaagaccacatcagtgtcagatttgtaagaaagcgtttaaacacaagcaccaccttatcgagcactcaaggcttcactcgggcgagaagccctatcagtgtgataaatgtggcaagcgcttctcacactcgggctcgtactcgcagcacatgaatcacaggtattcctactgcaagcgggaggcggaggagcgggaagcggcggagcgcgaggcgcgcgagaaagggcacttggaacccaccgagctgctgatgaaccgggcttacttgcagagcattacccctcaggggtactctgactcggaggagagggagagtatgccgagggatggcgagagcgagaaggagcacgagaaagaaggcgaggatggctacgggaagctgggcagacaggatggcgacgaggagttcgaggaggaagaggaagaaagtgaaaataaaagtatggatacggatcccgaaacgatacgagatgaagaagagactggagatcactccatggacgatagttcggaggatgggaaaatggaaaccaaatcagaccacgaggaagacaatatggaagatggcatgtaataaactactgcattttaagcttcctatttttttttccagtagtattgttacctgcttgaaaacactgctgtgttaagctgttcatgcacgtgcctgacgcttccaggaagctgtagagagggacagaaggggcggttcagccaagacagatgtagacggagttggagctgggtattgttaaaaactgcattatgcaaaaattttgtacagtgttaaggcctaaaaactgtgtggttcagagactaattcctgtgtttaatagcatttatactttaagcacaactagaaaattgtaagaattgcactctacttatgtatcactacaaactttaaaaaactatgtctaatttatattaatacattttaaaaaggtgcccgcactaccatacatcagtatttttattattattattgttattcctttttaatttaatgtgctcgcactacaatgcatcagtattatgattcctctgtactttcctttcgctattcatcaatttcccatttttttttttcagcttaagtaaccacacaattttaggcctcaatttttttttttttctgtgaaggaacttgaagtgatgcatgtgtgaatttaagataccgaagtcttaaagtgacctggacgtgaaggaaaaagtaagatgagaaataaagaaagcctttgtaaggtggttttaaaagccttatatgcaaaccttttaatctgtgtttctgcaagtgccatccttgtacagtgttaagagggtaacatgggttacctttgcaccagcttcagtgttaagctcaccctgttctttgaagcacccatgtcagtattagaagaataggcagcagttccttagtttacatatgtttgtgcaattattttctgtacttttttgttcattaattttgtcagtattacaccaaactgtttttgcaacaaaaaaattttttttgcattcatttaattttaggtcaaataacattttatttatgtggctcattttatatttcctaattttatttatttcatactgtagtgtacagtattatagttcttcaatatatagatatattttagtaaaaaaggaacatgacgttgatcatttgggcaaattttacgtaaagagaagagcatttattgtgttttggaacattaattgtgagatgggatttttcaattttattattttatttttgtttttttccaattactggaaattccaaatttgggaacttttgatacgatcttgtgaaaacactgtattttcgactgaaaattccactttcttcatcttgttttttagctaaaaagagggactgttaaatacaatgtatgataccatgacaaaaatctttcctgaattgtctttgtaaaagtattattgaattttcaatttgtaatttcttttgaaaatgaccatgctcgaataaaaatgtagccaaact

SEQ ID NO: 216 - DNA, 3645 bp, Homo sapiens
atgaagcagccgatcatggcggatggcccccggtgcaagaggcgcaaacaagccaatcccaggaggaaaaacgtggtgaactatgacaatgtagtggacacaggttctgaaacagatgaggaagacaagcttcatattgctgaggatgacggtattgccaaccctctggaccaggagacgagtccagctagtgtgcccaaccatgagtcctccccacacgtgagccaagctctgttgccaagagaggaagaggaagatgaaataagggagggtggagtggaacacccctggcacaacaacgagattctacaagcctctgtagatggtccagaagaaatgaaggaagactatgacactatggggccagaagccacgatccagaccgcaattaacaatggtacagtgaagaatgcaaattgcacatcagattttgaggaatactttgccaaaagaaaactggaggaacgcgatggtcatgcagtcagcatcgaggagtaccttcagcgcagtgacacagccattatttacccagaagcccctgaggagctgtctcgccttggcacgccagaggccaatgggcaagaagaaaatgacctgccacctggaactccagatgcttttgcccaactgctgacctgcccctactgcgaccggggctacaagcgcttgacatcactgaaggagcacatcaagtaccgccacgagaagaatgaagagaacttttcctgccctctctgtagctacacgtttgcctaccgcacccagctcgagcggcatatggtgacacacaagccagggacagatcagcaccaaatgctaacccaaggagcaggtaatcgcaagttcaaatgcacagagtgtggcaaggccttcaaatataaacaccatctgaaagaacacctgcgaattcacagtggtgaaaaaccttacgagtgcccaaactgcaagaaacgtttctcccattctggttcctacagttcgcacatcagcagcaagaaatgtattggtttaatctctgtaaatggccgaatgagaaacaatatcaagacgggttcttcccctaattctgtttcttcttctcctactaattcagccattacccagttaagaaacaagttggagaatggaaaaccacttagtatgtctgaacagacaggcttacttaaaattaaaacagaaccactagacttcaatgactataaagttcttatggctacacacgggtttagtggcactagtccctttatgaatggtgggcttggagccaccagccctttaggagttcatccatctgctcagagtccaatgcagcacttaggtgtagggatggaagcccctttacttgggtttcccaccatgaatagtaatttaagtgaggtacaaaaggttctacagattgtggacaatactgtttccaggcaaaaaatggactgcaaggctgaagaaatttcaaagttgaaaggttatcacatgaaggatccatgctctcaacctgaggaacaaggagttacttctcctaatattccgcctgtcggtcttccggtagtgagtcataatggtgccactaaaagtattattgactatacgttggaaaaagtcaatgaagccaaagcttgcctccagagcttgactactgactcaaggagacagatcagtaatataaagaaagagaagctacgtactttaatagatttggtcactgatgacaaaatgattgagaaccacaacatatccactccattttcatgccagttctgtaaagaaagttttcctggccccatccctttgcatcagcatgaacgttacctttgtaagatgaatgaagagatcaaggcggtcctgcagcctcatgaaaacatagtccccaacaaagccggagtttttgttgataataaagccctcctcttgtcatctgtactttctgagaaaggaatgacaagccccatcaacccatacaaggaccacatgtctgtactcaaagcatactatgctatgaacatggagcccaactccgatgaactgctgaaaatttccattgctgtgggccttcctcaggaatttgtgaaggaatggtttgaacaacgaaaagtctaccagtactcaaattccaggtccccatccctggaaagaagctccaagccgttagctcccaacagtaaccctcccacaaaagactctttattacccaggtctcctgtaaaacctatggactccataacatcaccatctatagcagaactccacaacagtgttacgaattgtgatcctcctctcaggctaacaaaaccttcccattttaccaatattaaaccagttgaaaaattggaccactccaggagtaatactccttctcccttaaatctttcctccacatcttctaaaaactcccacagtagttcatacactccaaacagcttctcttctgaggagctccaggctgagcctttagacttgtcattaccaaaacaaatgaaagaacccaaaagtattatagccacaaagaacaaaacaaaagctagtagcatcagtttagatcataacagtgtttcttcctcatctgaaaactcagatgagcctctgaacttgacttttatcaagaaggaattttcaaattcaaataatctggacaacaaaagcactaacccagtgttcagcatgaacccatttagtgccaaacctttatacacagctcttccacctcaaagcgcatttccccctgctactttcatgccaccagtccagaccagtattcctgggctacgaccatacccaggactggatcagatgagcttcctaccacatatggcctacacctacccaactggagcagctacttttgctgatatgcagcaaaggagaaagtaccagcggaaacaaggatttcagggagaattgcttgatggagcacaagactacatgtcaggcctagatgatatgacagactccgactcctgtctgtctcgcaaaaagatcaagaagacagagagtggcatgtatgcatgtgacttatgtgacaagacattccagaaaagcagttcccttctgcgacataaatacgaacacacaggaaaaagaccacatcagtgtcagatttgtaagaaagcgtttaaacacaagcaccaccttatcgagcactcaaggcttcactcgggcgagaagccctatcagtgtgataaatgtggcaagcgcttctcacactcgggctcgtactcgcagcacatgaatcacaggtattcctactgcaagcgggaggcggaggagcgggaagcggcggagcgcgaggcgcgcgagaaagggcacttggaacccaccgagctgctgatgaaccgggcttacttgcagagcattacccctcaggggtactctgactcggaggagagggagagtatgccgagggatggcgagagcgagaaggagcacgagaaagaaggcgaggatggctacgggaagctgggcagacaggatggcgacgaggagttcgaggaggaagaggaagaaagtgaaaataaaagtatggatacggatcccgaaacgatacgagatgaagaagagactggagatcactccatggacgatagttcggaggatgggaaaatggaaaccaaatcagaccacgaggaagacaatatggaagatggcatgtaa

SEQ ID NO: 217 - DNA, 44990 bp, Mus musculus
  misc_feature (21533)..(21552): "n" at positions 21533 to 21552 can be any base
  misc_feature (23415)..(23434): "n" at positions 23415 to 23434 can be any base
  misc_feature (26984)..(27003): "n" at positions 26984 to 27003 can be any base
  misc_feature (28474)..(28493): "n" at positions 28474 to 28493 can be any base
  misc_feature (30246)..(30265): "n" at positions 30246 to 30265 can be any base
  misc_feature (34991)..(35010): "n" at positions 34991 to 35010 can be any base
  misc_feature (37458)..(37477): "n" at positions 37458 to 37477 can be any base
tttgatcctggaaaggcatcagaggctggtgtctttggtaagaagggctgtgtaccctgaacctgggatatggaggggtctgatgggtttgggggaagaagctgaagaagttatggcatgtcagagcaagcccttaaggtcagtttcctgcctccctcctccagggtactcagaatccaaccagcttgttgatttattatctttctaactgtcactgtcaagaaagtcctctccccgagagggacaaagggcattgtaggaagggcaaaaaggatcccatagttggagatgcctgagcggatccagactttgcaggtaacattgtgtgtatgtgtgtgtgtgtgtgtgtgtaatttccacggaggtgtagcagtagcaagccgtatcagaggcagtacagacactactgtcaagataggcaacaggtcacatccataccctctctcctgacaccaattacaaacctagggatccctgaggccaccctcacatttaagaactcactgggatctctgtcactcccagtcacaggtaaaagcaactcaggaaagggtcaagtgggcaagaccaggaggcgtcccagggaactgtctgccgtctcctgcagatggagtcccagctggtgctcactgctctccaaatgtgccaactcacacggagcaccatccgctgcctcaggtgctacctaaagcgcatattggggttccatacttgctgcctgtgaggtcaacaccagtccttcagatagtctaaggcccagcttcgtaagcttggctcaaagctggtaaccatggcaatctcgttgatttacactgtaaggccaactctctaaatgaagatccgctcctagaacagcactttgtggaagctaagggcaaaggccagacctccttgtagacaaggttaagaactttacttgaatgtagataaattcaacttctggcctgcattaggctgcagaggccattcttcaggactgaaaccccccaggacatggtcctcagctgcacagactgtagaaggaagcccaggggactggctgcctgcttgcatgctgtagtcacctgtcataccctgatggcatgttgaacaccagctgggggacagcgtcctggaaagggacagggtggacaagccaaggccaggcctgaccccagggcagcattgattccagaaaggaagttagcaaagttgccattaggtattgagctctatgatggaagcaaaaagccaagttcaaaacaatgtggaaggaagaacctacctttgaataggagtagaggaagtgaccacctggtggaggatgtggttccgttggcagagtgcttagtgtctagcatgcaggaagcccacagccctgggagatagaggtaggaagatcagaagttcaaactcatccttggctacctaatagtgagtttgagggaagcccgggctacgtgagatgcagagatgcagtgtcaaaacaaaaaacaaaacaaaacaaaacaacaacaacaacaacaacaacaacaaaaacccaaaaacaacctttagtcctagcacccaggaagcagatatagatgggtctctttgggttcaaggccagcctggtctacactgtgaattctataacagctagggctacatagtgagactatgtctaaaaacaacaaaattcccccaaaaaacaagaatcaagtaatgcttgttcaagtcttctttgtttttgtttgtttgcttgtttgttttttgttttgttttgtttttgtttttcaagacagggtttctctgtgtagccctggctgtcctggaactcactttgtagaccaggctggcctcgaactcagaaatctgcctgcctctgcctcccaagtgttgggagtgcaccaccatgcccagcacttgttcaagtcttaaggagttgggttgttaagtcaaaggacagaggcaggtacagctttgcccctagggcaaaccccatgcatctgttcacttgtgtagcctgaggagacaatgctatctcttgcagtagtatggtatcttagccaatgatcgattgatcgatctctctctctctcaaatacacacacacacacacacacacacacacacacacacacacacacacacatatgcgtgctgagcagagaaactctggcttctttcccacttaaggtctccggtaggaaggcagcctctgacaatttcactttccacactccagcccaaattggagagcctcacagctgccagggcaggcagataagtttgccacccaatagcagaaacgaccgcacttactccaaaccctaatcattccagtgcagcaaatggagaaagagcctctgtctttattaagattttttttaacttatttttattttttgaatgtagccctggctgtcctggaactcactatgtagtccaggctggcctcaaactcacagagatcctcctgcctctgcctcctgagtgctgggaatataggcgtgcaccaccacgcccagctaagaagagattctaaaatacaagtgtgtgtctgtgtgtctatgcccatgagtgtagtgcctgctgaatctgaagactgaagctcgagatacagggacatgggtcacgggtggtggaatgctgacgagggtcttctagaagagcagaaaagggggctggtgagatggctcagtgggttagagcacccgactgctcttccgaaggtccagagttcaaatcccagcaaccacatggtggctcacaaccatccgtaacaagatctgaccccctcttctggagtgtctgaagacagctacaatgtacttacatataataaataaataaataaataaataaataaataaataaataaataaataaaaaagaaaaaaaaaaaaaaaagaagagcagaaaaggtacttaactggtaccttcagcctcctgtcccggatttgagacagggtctcactctgtagcacaggctggcccacatccatagaggcagggagagcaatggggttccaggggcagaggaaaaggcacagggaggcatctgatgatacaaagtttcagctacacatgttacataatttccagagctgtacctgctgaagcgtccatggctaacagtcccgggacagggatggctgctgtcctgtctatttgatggagtttacaatttgtaaacctgggcatgccggtgagggagtttctagagtgggttgattaaggagggaagccccgtcctaatgctgggtggcatctgctcaggggcttagcctacataaaaaggagaaagtgggctgagccaccaacattcatctctcccttcttgctgactgcgaatgccctgtgacccactgcatcatgtggctcttgtcatgtctttcctgttatgatggcctgccttctcaactcccaagccaaaataaccctgtccttccttgagttgctttcgtcagacactgtgtttcagtaagaacagtcactcatacaatggtggattgtaagtttaagttagatgtgaagacagatttttttttccctttggttttgttttgttttgttggttttgaaagacaaagtttctgtgtgtagccctggaacttactctgtagacccggctggcctggaactcagagttctgcctgcttctgcctcctgagtgctgggattaaaggagtatgccaccactgccctgcttgctttggttttctgagacagggccttgctctgcagctctaggctggttttaaacataaaatcttgtagcttccctcatgcacacacacactgccactaatataactaattataattatataataattttttaaagtttctgaaagcagatggtagacaagatggctcagaagttaaaagcatttgctgctcttatagaggactatggttcagttcccagcactcacggggaggcacacaatgatccttaactcgtttcaggggatctcgcgccctcttctggcctccatggacaatgcatgcacatggtacacaatcatctatgcaggcaaaacacttatcacataaaataaaaataacatataaatctccttttaaaaagtcaggagaggggctggagagatggctcagaggttaagagcaccgactgctctttcagaggtcctgagttcaattcccagcagccacatggtgacttaaaaccatctgtaatgggatccgatgccctcttctggtgtgtctttagacagctacagtgtgctcatatacattaaacaaacaaacaaataaacaaacaaataaatctttaaaaaaaagaaagccaggagagattggttagtgggtagagatgcttactatgggggcctaactagtctttggaacctacagagggaaactgactccatacgatcttctccaactgtagccccctcccctaatattaattaaagcaattgtttttcaaaagatttctttagttttatgttatgtgtatgagtgcttgcctgcatgtatgtagatgtaccacatacttgcctggtaccctcagaggccagaagagtgttagattacctggagctgaaattacaggtgtttatgagccaatatatgggtgctgggtcctctgcaagagcggccagggttcttaatggctgagcaatctttctttcttgtccctaagatcagtcattacaagggaatgtagggatgtggttggcatctgtacagcttgttgatggagatagatggtttcctgggtatttgtatctaatgtcatggaaatctatgtattaaacatgtatagttttttttatatgccaaccacacttcaggaaaacaatttattcttattttgtattatttatgtatatacatgtgtgtgtgtaggggttgtgaatgtgtgccacatgggtacagatacctacagagaccagaagagggcgatagatcctctccagctggataacaggtgggtgtgagctgcctgaagtgtgtgtgtgtgtgtgtgtgtgtgtgtgtgtataactgaactcaggtcctctggtagagcaggaagtgctcttaactactgagccatcttcagccccaagaaaatagattaaaaaaaaaaactctttaatcccagcatttgggaggcagaggcaggagaatttctgagttcgaggacagcctggtctacagagtgagttccaggacagccagggctacacagagaagccctgtctcagaaaaccaaaaactaatcaaaccaaaccaaaaccaaaacaaaaaaaaccctgctagcctcgaatcctaggactcaggaggtagaggcaggaggatttctatgagttgaggccagcttggtctgtcaatatagtgagttccaggcaaccaggagtatatagagaaaccctgtctcaagaaaccaaagtgggtggagatatacctttgtggttaagagcactgattgctcttgccaaggacctgggttcaatccctaacatccatatgttggttcataatttttaacacatgcatgatagttcacaaccatccagagctctaagggatccaacgccttcttctgacctgcaggggcatcaggcatgcatgttgcacacagacatataaaggcaacatccttagtgtaaaagaagtaagtctttttaaaaaaataatctttgctggggatgatggtacatacccataatcttaacagttaggaggttgaggcaggaggatcacgaggagttagtcaacttcagcaacataccaagactatgccttagagattgaatatactcacagggccccaagtataggatgggcatcgctcgcccttgttgggcctgctataacttgccagcagtcagtactgtggttacaataatgtggatagcgttataattgctcccattaatattatgaatgaagatttcctcagaggaagcctctgagacactttagcaggctgaagatgatgggggtgggtcaggacctagggccattttattccctcaatccccaggactcacatggaaaagggaaagaacggatccctgcaagctgttttttaacctgtgcatgaaagtataacgtaaaaacaaaattctaggcctttaggcccaggcttgggaatgtgacctctgtgacttaatgctccaaggtatgctaatcataaaacagatagcgacattcctccacccgccagcttcctgggttcaaagagtgttcattcacagaaagtcaccctgaccattgctggaacccgctatgcaaatgtgctattgttaggggctcttagaaactgtcttgagagataacaggaataattaccaggtattccttgtgactcttgtgactttgtacttccttgggactcttaactggtatctttggtattttccaacaaagccctccccacttccttgagttgtggtttcttcctttaaatacccccttacccagctacttggggtgccacggtcctctacccctgcgtggtgtatgaccgtgggcccgagagcgctcttgaataagagtcctcttgcagtttgcagcaagaccgtttcttgtgtgatttggggtgtcgcctctcctgagtcagaacgtgggggagtcctcacgttgtgggtctttcatgcacacataaacaaaaacttaaaatataattttttaaaagaagacctagtataagaaagaacttccctaaggtgaagaaaaaaaatacttttttttttttttttttgagacagggtttcatgtaacctaggctgggtttgaggtcattatgtagccaaggatacagtaaacttctgatccagcctctgaaataaaatagtctcacacgcatagaccatttcattattaagagaaaactgcatcccctctggatggtttactttgttctgtgcaaaggaagactgcaactgattttgcacctaaaagaaaatacaatgtaaataaattaggcaaaaagaaagaaagaaagaaagaaagaaagaaagaaagaaagaaagaaggaaagaaagaaaggaagaaagaaagaaagaaagaaagaaagaaagaaagaaggaaagcaagcaagcaagcaacccattactcaggtagctggcaaacagcaggagaggccagatgcaggtgcacactagctgcacagctaatcttaaccctagcgtcagttttagtctattttcacagctagagaactccagggtctcagtgattcctccccagagtcaggggaaagagagcaggaggactctgtcacttgtcagctccaactccaacgaagcctgtgcatgagacaaaagtgaaatagggtcacttatcccaacagacctatggtcaggacaaaagtgacatagggtcacttacccccaacaggactatggtcaggactggcccatccccacaagtcaacaagacatctctggactcacatggaactgaagtagctctggggaccccaaactcaggagggggatccatgaggaaatgagctcaaagcgtcttgcaactgcacagtgttctgcttgcttttctgggccaacagagatgcaagcctgccggaggagttggcagactcaggacatcctgctgtttccctaaagcttctggatttcttaatttgaatctgcaagtaagaacccgactggccaggcttggatcaggttttctgtctcaggccaatcagctttggcagactccgtagaggggaggctgggcagagtccagtttaaaaaaaaaaaaaaaaaggtgacttgcttttcccctccctgcaggctgtgactgggaagaaagatcaatgaataacatttctggtgcacttggatttcaatcccaggggctcccaggtctcctccctattctggctgattttctttgcctttcttgtgtggctaattctttggatttaaaaccttcccttctggaaggaaagagattcataaaagtcaggttcagtcctcagcactagaaagttaaaaacaaacaaacaaacaaacaaacaaaacccaaaacatacatggcttgggaagtccagctatcggactcacgaggtccctctagtcaacagttgctggagagggaactcttgagctgctgataagtcatgcattggtccagggatgcatgcaggtttgttagttgggggcctttggggtgatctttttagttaccttgagttaccttgtaaataaattaaacactttccctggtttgccgacgtagactttgggtggaattctttaatctgtcatctgtgccttctctaccgcaaatagctgtctgtctccccagcaaaagtgacacaagccactcgctgagttttaggtaagtgccttaccagtcctctgcatctccattcattttaaattaaaaccaagactcccagggcgctgaacggaggtggcgcacaccgcctttaatcccagcacttgggaggcagaggcaggcggatttctgagttcgaggccggcctggtctacagtgttagttccaggacagccaaggctatacagagaaaccctgtctcgggaaaaaacaaacaaacaaacaaacaaaaaacaaaaacaaaaaaaaaacccaaaaaataaaacaaaacaaaaaaaaaaaccaagaaagactctcagggcgaagttccgagaagccagactttctgcccacccacgacacacagccctgggcatcagggctctgggtcaagtgttaagattcttggagacaaatcttgtgtccccaggtcttgtccttccgactctgcctccctgtacgcccctgtgactcagcagctttccctgcctggctttaactccgggaatgggctgggtgtttgttgccgggtagatagagctgcagacttgggaacaggttctttctaatgcaaagcaagccctgtaccacggagctatctgtttgcccacattctatttcgaagggctttccctcatagtcttaactagatatgggcttaggcccccttacattccctctcctcggcctctctctctcttggttcccttcctttagcccacggaacagcattttcaatctagagtggctgcggatgcccagctgtcttgttcagctacagcaggttgtgagcaaccacctggcgtctcctctactggaccccaaatgcctgaattctcctcggacgtctgttagtagaaggcaaagggtgtgaagtcttcactcacatgtgatttcacaaactctccaaacctgatttggttagtcttggtgtggcacgctcaacagggcaggaggccacgtgctgagaccaggctgggaaaaagtgtccgccctctctacactgcaggaaagcagacatccagaacccgcgtgacctcacgtagcgagactccgcagtctcacaaacccactttgtcttttttaatttcttaaatgcttgggaaatggcggaaagaggctttgacactagggaagattgcacgcaactttacagtgcggagccggctctcgggagagtttaatttgcaactgactcgctgacgcacgcgggcgtgtcgcaggctccggaaatcaaggttggagcagaggggacagtagccgctctgacctatacagcgccacttccagagcccagtgtccccactgggcctccgagtgacttgcagcctcggcgactccggcgacactatccgctgaggtccctaggccaccgctctgtgtgccggaagctcccctccccctcttcccaaatgcttccagcagcctggaggctgcaacagtgacccgcgtgtccccgcgcacgcacacacctcacgcacgtcagacccacgcctccctatcgccccgtgccagagtgcacgcaggcctttacgcgcggccacacatgatcacagagccgcagagggcgagagcgcggctcgcgagtgggaagaagaccccgagactggtctgggcgctgtccggggtggagccgagggcggagcttcggggtccggcgcgcagagctggggcgtgtccgcgccgccgcgatctgcgccgctccgccctcggcccgttcgctgcgctcccagcctcctcgccgcaacccccgccgtagctgccgctgctcccgccgtcaccgcctccgaggtaggcgcagcggagagggcctgggctatgcctgagtccccagggcctcgggtcgcgctcctgggaagtctccagggaggcgatcgagggaggttcgggcgagggcgctgggcctaagcgcttggccccgggaagggtgaaccagggacgatcattgcgggcctggaggggcagcgggcttgtagaggaggcctggagggcgggcgcagagcggatctcccagattctagctcgagcgttcagagcacctgcatttggaagccaggggcggttcgaacatgcgaggagcggaagggcaagggcggccgcgtggaggcccggcgggccgcgggtctaggtgaccttcccggcggcgccctctggctctagatcccgtcggtgtggatctggtagagaccctcccacggcccaagcccttccccaccagctccaagggcctgtgcagacccagcttcctccgccgagaggacgaactccaggcacggccatgccctggatcccccagcccctacacgccctagccggcccacgcccggagtaggtggcgccgggtccctcccgcgcatgccagtgtcttcccgggcggaacgggctgccctgagtggacttaggccgcaggaacagggacctgggcctggactgagagcgagaccccatagggagccatacgcttggcctccttggcctcggggacggagtccgtgttctgtgtcgccaaatgcaactgtgcattctggaaactgttttcagggcctgacatcagattggaggcccgcaactctacacggtttgtccaaggtcacactggtaggaagatttaaaacttcaatcttctcatctgcgaaataggagcaattatatacacttcactgagtttgggggaaagaataaaatgatccgattaacacgaagccttggggcatgcacaaggacaccttagaaaccttgacatttgcctaggagacctaggagcttttggggagggttgaactcatcctccacagacttttattttattttattttttattccacatggtgtacaggaagggactccatgaatatacaggcgtattattttaatgccattattactaatgtcagaagcaagcatttgtgcagcaccaggtattgagtcattggagaataattcacgagacactgtcagtttgcagattgacagctgtcaggctggagcactaaatctgactgcagacccagaatgcaggaagagtgtgggcttagctcaggtgtgtgctgtccaaaacttctctttccttgaccagagatatgggtgaggggcttaactccggcttgtttactagcaagccaggcataactgcggagggcctgcctgcttttctcgggactgacaaaactgaagggccaaactcaggcttgtcttcagggacttgggtgggaccacttggcacacattaggtggttaagaaaggtctgtggggtaaattcatttttaaaaaatgtctatttaatgtgtgcatgcttgtgcctatgtgagtttatgtacatacatgcaggtgtgagatgcctcatgtgggtctgggaatcgaacctgggtcttctgcaaaagcagtaagcacttttttgtttgttttgtttttgttttgttttgtttttttgagacagggcttctctgtatagccctggctgtcagcagtaagcactctttttttttttttttttttttttaagatttatttattattttatgtaagtacactgtagctgtcttcagacactccagaagagggcgtcagatctcattatggatggctatgagccaccatgtggttgctgggatttgaattcaggaccttcagaagagcagtcagtgctcttaaccattgagccatctctccagccacagcagtaagcacttgtaacccctgagctctctctccatttttttttctttcataccactcttaactacccaggcatggtaggtgcacattcaatcgtggaatcttaaaacagccattagatgacctagacagctcactcacttctagaagctatcctgtcctagccgagtcatagatgtcataagagctgtaatcgtacatactcacctacagcagtagtcatgagagatgagaaacagctcctttagcattctacaacttcccaagtcctgggggaacttgtccaactggtgtttctgggcttaaagctagagagtgatatgggtagatgggattctggccaaagctgtggggcctgtagcttcttccctttctgacaggtgtgggggtatgacagctcgagtaaggtgccagtccccacttgtagtagctcacagctgattcgctttatttctggtttctagaatgaggctttggacaggggctgtctggggccatgcggtcctcatgctggacctgagcccctaggattccggaaaggttgtactgtcgttgtagctttgcgctttccccaggttccttcggtacctgaaaggatggcagaggcatgcttagctagacctgggtgtgggtctccatcccgcagttaagtcacagcatgtgagcactttacctagggctgagctagaaaaagctccagagggcagcctgggctctcagttctgatctgacaagagccacagagtctagctcaggtgaaatagctttctcgtgtcttagttcctctgttataatgtggtggattgattgattgattgattgattgattttggcttctgtttttaaaaaaattaattgtttggaggtggctagcacatgtggaggtcagaggtcaacttctggtcttcctgtctccactcaggccttgggatcacctgggtctgcagtagaactgtgactgtcagtgctggccattctggtgttctgcggccctgctgtgtatacttggtgcttgggcaccagtcctccgctagtatccccacactgcactgctgctgtgttctgaggaacccataggtgtgagtgcctctgcacagcagaagttaccaactggttgggaaaggagagaggtagctgctgtgggccatctgtagtggacggtgctcatagaaatcatttgccctggggtgagataggaggtgtccttccgggacctggccagacagtatccggctaaacaatacctctctatgggtgggaaggactctggaccccgtggttcagggtgagcttctgacaagatgctcagaaaccattattataatagtagatatacaagaccagagcttggttagattccctagccataaatatagcaatggaaactgtctattggactggcttgtgtgggacttagtagaatgctagcccagcatgcagaaagccctggattcttccttcaacactgcagaaactcagtatggtggggcacacactcagaggtggaggcaggaggatcaagttcaaggtcatcctccgtgacatagtgagtttgagactcactgtgggctacattagatcctgtttcaaagccaaaccaaactggctggtggtgcacacctttaatcctggtacttggcggggtggggcaagggggagggcacagaaggcagacagatctctgtgagtttgagaccagcctggtctacagagtttcaggacagccagggctacacagagaaaccctgtcttgaaaaacgaagaaccaaccaaccaaagaaaccaaacttattatttatttgtctgctcatctcagatgataagttgacctgtcatctgtcatcttaatagaattctacttgtgtttgtttcatggcttctgcatgtaccagccgcagggatgtataccaaggggaattgggtcagagagactgactttggggtcttttacttagaaagggagtaggatatagacccatatgtccttgattcccaaggctgagcacttaaaaaaagcgctgactgtgtcaaccccctatgccttgtggtgcctgggctatcctggagccctggtgtacctggctggaccctagaccctggagtgctgctggctgcctgcatggccttctctccacaggtgggtgagggagagaaggcaggttgccttgagtcaaccacagcctccccagccttatagaaggctgtgctgctgctggtggcccagcttccagagggttttaaaatagaagcagagcctggaaagccagactgtccccctgtgagactctgtggagggggaggggaaggcagctgctttgggaactcagcctgcttccagagcagaggccactgccttgccagatgtgtgtgtgtctgtgtgtgcctgtgtttatgtctgtctgtggtgcagggaagctcctgaactgagcctgctttctgctgagaggttgatttttgcccctggtccctagcgttggagaagtggttgattttgctgtaatctatcatgacctcttttttatttgttattttaatttttagatatatttattcattttatgtatatgagtacagtgtagctgcctttagacgtaccagaagagggaattgtatacattacaaatggttgtgagccaccatgtggttgctgggagttgaactcaggacctctggaagagcagtcactgctcttaacctctgagccatccctccagcccccaacctcttgatttctttatatgtataagggttttccctgtacatatgtatgcatatcatgctcatgtagtacccacagagtccagaagaaagcgtccatcagatcccctttaactggagttagagaatattttgagcccctgtgtggatacagggaagcaaacctgggtcctctgcaaaagcagccagtgctcttaatggctcaaccgtctctccattcccttgatacctcttttgtttgtgggtcaattttttgccctggcaaaccatccaaaactgttggagaaagagcagagccaaaagttttcccatgattccctaacctgggatggtgatggtaacatttggtggctttggctcctgacagtagctatgtactgttaaccggttattcatgcagcgtaataaggaagtcacttgcgggtgtacttgagaaagggtgggctctgggtcacacccaggggctcttctgccaagttgatgactcctccatcatcatctgtagttccctggatggtctgagagatgccaccgtaggtggctcctgatttttgggaagctgatcttgtttcccctttgcttttggagatgggggtctgagctcactgcgtgtttccagtgttgaggagactctacttcctggttaggcgtgagacctgtgttagcctgtgttagcttggggttctggtgggtgcacagtgccgagtgaggctagtctttttttgtagtccattgccaccctccctcaggctgcttgatagctgccctggcagtttttatacacattgaagataaggagctttgccctgttctttgccttctgggcggagtggcccagatgttggtggctgctcgggagaggaatatgcccccataggccttgcccagtgatagggctactgtctcagtttgaatcagtccttagaaccagtatgaacactgtccagacaacttttccttcctgtatcttaaaatattactcttatgtcaatgggtgttttgtctgcttgtgtgtatatatactataccatgtgcatgtctggtgtcctcaaaggggattgaacctccaggaacaggagttacagatggttgtcagccaccacataggtactgggaattgaaccctggccctctggaaaagcagctattgctttaaaccaactaccatttctccagttctttctcttaaaaaatactttatgtgtacgtatgtgtactacatgtgtgcagtgcccgagaagccagaggagtgcgttgcagctcctggagctggaaacccaaccctgatcctgagaagagtgggcagtgcccttagcctcggagccatctctccagccctttggtgtcttgactgtgatgacatgttggaaggttgctgacttccaatgttttctgctcttcacaacactatttcaataatgaagtagaataaaaaatggaaaccacatctgaattccgcatctacttttcccaaaccacatttctccctgaggcagccatcctgcccagatggggcccctctttcctgatttctcccactcactcacaagttcctgaattgataaaggacccactaattatgcagaattagaaatttccctggcatgttcttttcttttctctccttttcttttctttctttttaaaaatatttatttttacttttttaaaaaaaattaggtactttcttcattcacatctccagtgctatcccaaaagtccccacccccaccctcacccccacttcccggccctggcgttcccctgcactgaggcatataaagtctgcacgaccaatgggcctctctttccactgatggccttatgttcactttttgaggcagtgtctcattatgcagctctggctggccttgaactcagagatctgcccgcctctgcctcatgggagttggggttttaaaggcccgcaccacaacacccagcttggctttctcttttcattaggtggtacataatgttctatgttctcacatataaattcaccactgttaattaattgtgttgagatagactcaaaacccaggctattcgtcccctgtatgaccaacaataaccttgaacttttggtcctccagcctcatcctaagcgctggaattacaagttttctgcccccgtatccatctcccctcattgctttttgatgactctttggtgatccttaatttgttactatcgtactttttttggttatgtcatttttctaatgatgggcatattggtcacatctaggtttgtgtgacacaggcaatggggtagagaatatgttctgtaggtattttggtgcctagaacacttagtgcgtggggttcctggagtaagattaatgctgagttaattgtttatcaattattctctaaaaaaagtggactgtattcacattccgtttcctgacatttttccattcttggggtcgtcagtgtacagcagctcctggaataaaacccatagctggttttaaggcctgaagcacccaggataccccctgagaggtccctcaccctggcctcagctctttcctagggggcttgctgctctggggactcctggtctggtctgctctgctccgcgctggcttgccagctgcctctgggggggtgggggtgggggtaggggaagcgcccacttcctggttacattgtaatttacttgttcctattgtcagacaccaagtttctactttcctctttttgttacaatgatactttttctttctttctttcttttttttaactgagtcgggctctggcctgagtcctggttcatctagaactcaccttctggactatccctgtttgtttttcatcctttttttttctctctcttaaattttatgtatatgaacgttttgtatgtgtgtacacctgtgagccaccatgttggctgattctaatgaaagaacagcaagtgctcctccctcacctctgagtcatctctctagctcctcctctccactgtttgttttttttttttttttttttttttgagacaagagtcttatgtcgcataggctggcttcgaactcactatgtagccagtgatgacttagaacttctggtcttcttgcctctctctcctgcaggctgggattattgtcatatgctaccaagcctggtttatgcaatgcagtgatagtactcagggctctgtgcatgctaagcaagcattataccaacggagactcatcccaccccttaagctcgtctctggcctcagcctctgaaactgcggcagcaaaaagcacgaagcacacccggcttgcggtgatgctttgggagggctgatgaggtagctcagcagttaaaggcacttgctgccaggtctgaagacacagtttcagttctcagaagctatatggtggaaggagagaactaactcctaaggtgtcctctgaccctcacaggtgcaccacggtacacacaggctcactaaatacacgtaattaaagatataagatgtgttactcactgcatagtaactcacgaatgcccatcatgtgctgggccttgacttctttatagacatttgggtaaacatatgcttgacgggctccgaggagctttgagttcagggggtgtatggtgggaggaggggtagagggtgggagcacggtgagtgagcagctgtcactgccatgtagttgatgagtcaggaagatgttgtcctccctaggccccaagatggaagttacgtaagtgggttgtgtgaactgctaggtgatacacaatccttccctctgcttccagtatggctgggtatccattccttaggctggagtggcgtttgcataatttgttcaaggtcagccagggaaggcttgggttggtaggctggcagacaggggggcaggggagtcggggaggagcaggtgtcccccgagccccccccccccccattgaaggcagtatggtggaatagaaagaaagggagcctcactgagcctggcccctaccctgagctcagaagttccgactcactccctggttgataatctccttagagctgatgcagtagctggtgtttgctgtgggtagtggtttttttttttttttgttttttttttttcctcttttgacaggtggctttccatgctgggtttgaggattagtgtcaacagactgcatttggggaacactaaataatgaatgttctgtcttttcctcaaggtgggatctggtctagatgcctgcagggtaggggctctggggggctgtcttttctgtgaggtcagagaagagtagcaggaaagacctggcttctgataggctcaggtagacacaggaagatcagaagttcaaggccattcctgtctgcatagtgagttggaggctcgattgggctacataggaccctgcctcaaaaggaaaaaaaagaggcaggtgtgtaggcacactttcaaggttagctcaggggttaagtaagagcactgtatttttgttgttgttgttgttgtttgtttgtttgtttttttaaactttggacctgcagttttgttcccatgactacctttaactccagctccaggggatctggtgcctccttctggtctttacaggcacctgcacacaagtggcacacacagatatatatttatatacacaaaaataaaatgaaatcttaaatattggttagagtgtgtgcatgggcgctttagtgttcttggatgctgcagatgggcccgctccccctctgatccttcctctaggggagagacagctctgtctgtagatgtttctttttgtttgctttgttctgttaggggttttcaggtttatttgattttatgtgtagaagtgtttttgtgtgtgtgcgcgcgctgggtcccctagaactggaagtcatggacagttgtgagccactgtgtgggtgctgggaattgacccctggtcttctacaagagcaacaagaagtcttagccagggagccatctctcttgtttttgtactttcacggatggctcttaatccagcagagatggagaatgttctgggctctctgccaagattttcttctgcaggtctgctgggctgggctgcctttcagcccaggattgcttgggggtgacttttcttaggggaagggctaggcccatctggcctgagggggaaggggaagaggggagtccccagctctggaagagcgggtggggcagtattgggtatatctctgccctctcttttgacctgaccttaatgtgggctggtctgcctacattaggttccagcctgttggtgggcgagaggtaagagccgcagcaacacaaagaaggctcgagcagtctctgaagatgtgaaccatggcctgggccgcagattccattcacagtggaggctatggctgtttcttctgtagtgtttattgggtttggccgtaggctgtctttagttatttactgaaggattggtttattatgtggaggtaacttttgggagtcccgttgcatcctgcaggttccagctgtgccagcaggcaccttcacctgctggattaccttgcaggtcctgctgtgagctctttgtggtgtccttgattcaggtgttggtcagttgatattgtttccctggaatcatttgaaatcttcagtgggcgcccactcgccaggaatataccatagtatattcgtgtttgtgaatgggtacatgtgtcatgtcagatgtcgcctatgcagatccagtttgataaattaggtgtacagtttttgttgttgttgtttgtttcttcatttgtctcctcacctctgagacaaggtttctttgcataacagacctggctgtcctggaattcactttgtagaccaggctggcctcaaactcacagagatccacctatctctgcctcttgaggagctaggatcaaaggtgtgtgtcaccctcacctggtaggtgtgcagtattttaaatgaagggaaccagctgaggatgtagctccactggcagagtgcctgcctggggacttgaagtcctaaatttgatcccagcagtgcagaaactagatgtggtgatgatgcctgcaatttcagcagttgagggatggaggattagaaattcaaagtcatccttggctacatagaaagttccaggccatcctggactacatgagatcttgtgtgtgtgtgtgtgggggggggttgtgtggtgggaatggaaccactcttctggttagtgacattatggttctgggatgggactcttgtcactcatgggtccttctcttcaggacagaagtcacagtgtgtgctgtcccagagcaaggtttaattttttctacacagcttgtcaacataaaaccttccaggaatataatgtcacagagaccattagagttattctctttccctgaccactgtgatatttaactaatatttgctcactaacttaattatgtgtgacaactaagtcctgcttctgacctcctagggtcccagcacccatgtgtgtgtgtattcactcatagatacgtaaataaaagagatgatagcacttttgatggaacctggagcctttcatatgctaagcagatgtgctaccctgcactctagtctcagctccctggagagtatttttttttaagatttattttatttatatgagtacattatagctgtcttcagacacaccagaagagggcatcagatcccattacagatggttgtgagctgccatgttggtttgctgggaattgaactcaggacctctggaagagcagtcagtgctcttaaccgctgagccatctctgcagcccccaagtagtattttatgtgcatttgggtgttttgcctgcatgtgtgaggctgttggattccctgaaactgctgttgcagacaattgagacctgtcctatttgagtgctgggaattgaacccagctcctggannnnnnnnnnnnnnnnnnnntggctcacatacatacatgtgtgaacgtggttcacatatatacatgcggaaacacataaggtgaaaaagaaggggctggagagatggcttggtggttgagagtactgctgctcttctggaggtcctgggtttgattcccagcacccatgtggcagctgaggttgtctgttaccccagttccaggacatccaacaccctcacacagatgtgtgcaaaacatcaatgcacataaaatcaaaagaaatcattaaagaaaaagccaggcagtggtggcacgtgcctttgatcccagcacttgggtgggcttgtgggagtgacaggtggatatttgtgagttcgaggccagcctggtctacagagcaagttccaggacagctaggtctacacaaagaaaccctgtctaaaaacaaaaatcaaatcaaaacaaaacaacagcccccccaacccaatatttaaaattgttttgtgtgtgtgtgtgtgtgtgtgtgtgtgtgtgtgtgtgtgtctgtgctcgtgcacatatgcacacgtacatgggcacatgcatatagaggccagaggacaacttgctgggggaactatatcattttctcagggattgaactcagggagcctggcttggtaacaagtggcaaaagagccactgagccctcttgctggtcccttcttttgtatccttgtagtttgtttctttctctctctctctctctctctctctccctccctccctccctcccttccctcccttccttccttccttccttcctttctttttttctttttttgagacagggtttctctgtgtagccctggctttcctggaagtcactctgtagaccaggctggcctcgaactcagaaattcgcctgcctctgcctcccaagtgctgggattaaaggcgtgtgccaccaggcccggctatgatacccttcttttgtagcatgttgttggacttcatttcctgtgaggagatacttagctagcttgtcatgctgtaaagaaagttttgtggagctgggcttgcagctctgatacttgttgaaggaatgaaatcagaaccatgtgaaagatacatcgattgccatgggaagcttcaatttatccgtgtgcagttaccagctgggcggccggcattttgtaattactggcaagagttctgcggttcagtatagtggctgactcctgggaatatgtcttggatggttcattcattcatcaaatattgactgactccttgtgctctgggtcggtgcttgggcctggcgttgctacagtcaaaagcaatcactaagtgtccccagctctagcctcaggggaagggtgagacaactcagggcacacccacatctggcacacccacatctggatgcctgagacttagagctgagtgatttttattggttgtttaattatatcaaataagttttattggtggtaaactaatttccataattacctatgtgttcattctttctcgtgcttttgttgtggcagaacatggccgtgcctcccacatacgccgatcttggcaagtccgccagggatgtcttcaccaagggctacggtgagtgtcggaggagtcgggagcaatgggaagcctttcacctactaagggagttggcatctttgtgacacttgaggtggtcagttcccagctgacaacttatatgtccagacaaaaggatgagcttcctgtggctgtgcgccacccagtggtgaggctcaggcatcacaggggcaaatggcagatctagtcccttgcaagctccagcgtctgccccagtagaacactgttctaaatttaccctgatggtcccacctctgatgactgcctctgccagctgctggaacctgccccacagnnnnnnnnnnnnnnnnnnnnctgcaagggcacaggtcaggcctgtgtttgtgtctgccactgttgccctggcttcctttaagtattttcagatagctaggaggaaaacagtggtgtcctagcttcaagctattattttgattatttttttttttcctcagtgctggggtcaaacctttagcttgctagcaaacattctgtggctgagatacacctccaactcctggcttaattagttaacctgattttggctgtttttccttctttaggctttggcttaataaaacttgatttgaaaacgaagtcagagaatggattggtaagtctctccacttgcacgggacgttatattgtcccttaccaggagtgggtactgtggcccgggtggcagagccaaaaacagttgcctgcttggattgtggctgttagtgcttgtcatcgaagcgctgttccataggtggtctgggactatagtagcttttaatgctttttttaccagttattttatgttgtttgaaatcaaaacttctggcctaatgtactgtaggtgtgtgctgtacccactgatctaccctgatccatccttgatgcttcttattttaaatttgacctctccttcccccgcccccctcttattttgaggtagagtcttactgtgtagtagctcaggctggcttcaagtcacagaaactctcctgccttagtctctcatgtgcttggagtataagatgtgagccattacacctagctttgacctaggttgttttgtttctttatttaaagacttaatttatttctgtgcatgtgtgcgtgcctgcaggagtttgtgcaccatatgcatgcaggaacctggggaggccaaaggagggcattagattccctggactggaattacttttataggccattgtgagctgcacagtgggtgctaggactcgaacccaggtcctctataagagcagtaagtgagtgctcttaattgctgaaccatctcttcagccccgctgacctgttttttttgttttttgttttttgtttttttttgtttttgttttttcgaaacagggtttctctgtgtagccctggctgtcctggaactctctctgtagaccaggctagcctcgaactcagaaatccgcctgcctctgcctcccaagtgctggcattaaaggcgcgcgccactaccgcctggctttttttttgttttttttttacttattcatttatctttatttttttgagacattgtctatccacatggccctggttgctctagaactcactctgtagactaggctggccttgaacacacagagctccacctgtctctgcctgagtgctgggattaaaggtgtatggcaccacctatgtttgtaatgtttcattattatttaggaaacatttctggtgttgattgatacagatacaggtatctgtagcaattgttggagggaaggggtgtgttgctctgtcagtagtagctccctctgaggctggaggcaacatggaagctgggtggtttcctgttcagactttagggcccccaagggaagaaggaagctgtcttccaacaaagacctttccagtaggtttccttgggtagcagacctctcactcctctgtatttccagtatgtaattgaactgtagaagtagttctgcctggacacgttggggactctctgttgcttaagggcctggaccaagggcagactggactgtaggctaaggtctctatctctctctcctttaaggaatttaccagctcaggctctgccaacacggaaaccaccaaagtgaacggcagcctggaaaccaagtacagatggactgagtatgggctgacgtttacagagaagtggaacacagacaacaccctgggcactgagatcactgtggaagaccaggtaagagctccctgcctgctggaagtcctggctcctctagttcccattgagacatcctgggtcctgtctttggttaacctgtgccacctttctcttatttgcagcttgctcgtggactgaagctcacctttgattcgtcattctcgccgaacactgggtaaggttctccttacccacgaggatattctgagatgttatgggccctggaagtccattacagcaaaggatttttgggctgacatcatgccaaaggtagcctcttagctgggaggctggagggtggaaggaatcgtgtggtcaggaccagccaggggtatgtagtgagattctacatcaaagaacaaaaaaccaactaggtagcaacaacagtaaggctgccttggtccaagtgctacatattctggtctgtcgtggtgttctatccaggacatgaagatacaactgttaagggacaatgctgtagcaagcatttaaaaaaaaaaaagatttatttattttatgtatgtgagtacactgtagctgtgtagagagttgtgagccatcatgtggttgctgggagttgaactcaggacccctgctcgatctagctctgcttgctccaagccccgctcgctctgacccaaagatttatttattattatatgtaattacactgtagcagtttttagacacaccagaagagggtgtcagatccccttacagatggctgtgagccaccatgtggttgctgggatctgaatccaggacctacagaagagcagtcagtgcttttaaccgctgagccatctctccagcccattgcaagcattcttaatttaggaaatgtatttctctagcaaatggttttgtgtgttcctgtgctcatttggagactgaaggtgtctgagctgggatactatttgccccaaggaacttcccttttctttttgtcacagggtctcctatagctcagactggccttgaacttattttgtaggcaagggtgacattgaacttctggtcctcctgcttctgtctcttaagtcctgggatcatgggcatgtggtcccatacccacttatggggtggtaaggatggaagccagggcttatgcagtccatttgtgacgtatgctacgtctacaccgagctgtgtctccagggttaaggattgtccttggtagtggaggactcaggccagtgtttactgctaagatcccacaaagccactgtgtgcctggctgcaggccacgggctctctgtcccagctgatctgtttcacataaggatgccagtcaatgaaagtggccaaggctgaagggcagaggtgacatttggaatcaggggctgactggtcactgttgccagcctattttgtacatgtggagggctcttctcccagttttctgagaccctgagatcctgagagcttaaccacaaggtggctcctggggctgccaggtcctccggccagaaatagtttaggcttgttggttattgacacatcagaggacaaagagagcaagctggtctgcctctcctgagtgctccacagggcaaagaaggaactcttctttgagttcaggcttttactaagtttcaagctttgagtttttgatttggcaggtgttttgcttgtttgatttcttttttgtttgttccctttttttttttttttttttttttnnnnnnnnnnnnnnnnnnnnataaatattggtagttgacataaatccttgctgagggacagtgggtcttgagaaacagctgacagacactgaactaactgggcttcgatttaaatgtgggctggacctgagacctgaaggactcagggtcctcatcagtatccagaactcttgagttgtgaactcagtggggtctcacgactatggtggcaaaaggtctcctagcatagtcactaggcaagggaaagacccattgtttattttatgtgtatattcctgagtgtatgactatgtatcacatgtgagggggagggggaggggggacctgaaggtgtcggatgcccaggaactggagttacaggtagctgggagctgccagtgtgaatgcttgaaactgaatctcagtcttctgcactcttaactctgagcctgatctccagccccggggtccgctctttccagcctgatctccagccccggggtccgctctttcctttttcgctggctactgggtgaaccacaaagatgaccatctccctcaaactgctgtgtgggtagctttgaggtacatgcttcttttctttttttttaaagatttatttattattatatgtaagtacactgtagctgtcttcagacactccagaagagggagtcagatctcgttacggatggttgttagccaccatgtggttgctgggatttgaactctggaccttcggaagagcagtcgagtgctcttacccactgagccatctcaccagccccacatgcttcttttctgtaggtttggaaaacagctgagaggcctaatagatgcctgtgtcaggttttgggttagccgtggggagaggctggaaaaagaacatggttggcactcactttttgatctcttcccatggtgtacacagtgctgatgcggcctttttcagaccgaatttgagctcaggagaagttgtgtcctgttggtggcttagcaggtgtttagggacaactggccactgacctcacttctatttcctggcttctacacaaactgggaacaggcaaaatgtttaccgttcttgcatgattgtatcgagatgagttagctcggctttaatacactcttccttttccctttaggaaaaaaaatgctaaaatcaagacagggtacaagagggagcacatcaacctcggctgtgacgtggactttgacatcgctgggccctcgatccggggcgctctggtgcttggctatgagggttggctggctggctaccagatgaattttgagacctcgaagtcccgagtgacccagagcaacttcgcagttggctataagacggatgaattccagcttcatactaatgtgtaagtgtatgtggggggttgttttagttgctttcctgttgctgtgacagaataccacgaccaaggcaacccgtgaaagaaagtgtttggttagacccaccgttttagtgtgttacagtctatgagggcagcaggaacnnnnnnnnnnnnnnnnnnnncccaccttttggcatccatggttcagcggcatgtgcgtttttatcttttgtgattctgggctttttttttttttttcttttctttttttattgcccacctaagcctcttcagtgctgggattaaaggtatgagctgccatgtgggtgcttggaactgaaccttggttctctgcaagagcagcaagtgctatcaactgttgagtcatctctccagccccctgaatttaaccttttcttttgaaatagttttaaagtttttttatagggaactgtgatacaagcagtatgtagagctctcctctacttctcccctacctccctctgatgttgaagttttctatctgccatcacattataacatactatataatatacagctattcattacataataatatttcagtcaagcacctataggactgtggcctctgagattattacagagctgaaaaattcctgttgcttattgccatcaaaacacagtgcatttattgagtctgtcaaaattgacatgaacaccacccactctgttatctccccataaatgtggagcaggtataattttgctcatgtaacagtatttggacccagtgtgtgcctctcttgtggactcactccctgtgttcttaccattagagcatgttttttttttttgtttttttttttatataaaatatttactgtgaacccacgtgctatgttacgtgggggtgccttggacatctgtctcttgggtacatgaggaggtcatggttgagtggttaatcatggtcatctaggtttctgtaagtgcaccctgtgatgtttgcttaatgaccaaatggcccaacgatgcaattttcagaatgtgtccctgtcattaagcaattgtgactaacaaagatccatgccatcaagtgaccattggtaccacactattaactgatgtcctgctgatatcatctctctggcctggaacctagttctggatcctctattgcatcaagctctcaggtctcctttgtggcctctccctgggacacactctccatctttctctgtctctctcgaccctgacattttttgaagaattgctgagagctctttgcagagtgtccttctgtttggattggtctgatatttcctcctgagtgtattcagttgcatctttttggcagctgaggaagcggcacctcagtgtgctgtctggaaggccactattgtgtgtcttggcctgtgataccaaccctgattatgcggctaaggtggcatctgctggatctccgctgtaaagctgtcagtttccagctttgtgcttagtagctgtgttacggggagatactgagactgcaaatattctctctcatcacactttgggttacatggaagcatcctttgatgcttgcctgtgcaattattggtaggtgttcccttccttcttttcttgtttcttgagacagggtttcgttctgtgtagccctggctcgatctgtagaccaggctggcctcgaactcagtgatcctcttgcctctgcctcccaagtgctgggattaaaggtgtgagtcaccaggggagccatcattcctttcttacttatgggcttttactgtagggaagggcagtcctactcctcccttaaccagttttagtttttattttgatgtattatctttatattttgtctatatatgtgctttgtctacatatgtgtgtatgtatgtatgtatgtataccgcttatgtgcctgatgcctgtgaaggtcagaggatgagnnnnnnnnnnnnnnnnnnnnttagctcggctttaatacactcttccttttccctttaggtaaaaaaaatgctaaaatcaagacagggtacaagagggagcacatcaacctcggctgtgacgtggactttgacatcgctgggccctcgatccggggcgctctggtgcttggctatgagggttggctggctggctaccagatgaattttgagacctcgaagtcccgagtgacccagagcaacttcgcagttggctataagacggatgaattccagcttcatactaatgtgtaagtgtatgtggggggttgttttagttgctttcctgttgctgtgacagaataccacgaccaaggcaacccgtgaaagaaagtgtttggttagacccaccgttttagtgtgttacagtctatgagggcagcaggaaccactgagagctcccattttgatccacaaccacagggcaggcagaaagagggaacagtgggggtggtgggagacttgtgaaaccttctccagcaaggccacacttcctaatccttcccaaacagtttgaccaactgaagaccaagtattcaagtgcaggccatgagtgtttatgtgtgtggctagggtggtggcttttcttttcctaagtttggttttcagtcatttgggtcaatgggccccacggcctgtgagcatttttgtttcccgtcacactgaggataatcaggcactcattctctccattaactcggttaacagcttgctggacagtggggtgctgggtgaagggctggcctataggttggggagagtctgtgcgtggtcttggaggttgaaggacattgatgacatgaggtaacaattttagtcataaagacaatctgatttggggccggaggaaagctcagcagatgagaacacttgctgagaggataaacagtttggatcccagcattcctgtcatgcatggctcacaactcccagaaactctagctccagggggtccattgctctcctctgggattggaaggggacatccccccaggccccatacatataaaacttttttttttttttgaaaagtaactttacttgggttaattcgatgaagtactaacctgttctttccactagagggcgctaagtaaatagcttcttaaattcagaccaataatggtattagtctaaacaaatactttttccattaataacaattaaaaacatgtatatgtatgtatgtgtgtgtgtggggtctgtctgtctgcttgtctgtctttctgtctgaactcctatgcctcagtgtaggtgtggaggttacataacaactttcagggagtctgttgtcttcttcctcatccaaaccacagtgcttgccttccaaggaaagtggcacagaactttcttgaccattctggctgtatcagcttccctcctaccatctttgacacaaccattaaccaaagtgaatacacaaacacagtagacagcagaaaactctgtaggagtctaattttctagtttctgctttcatttggaaaaaacaaaacaaaacaaaatggtttatttttgctcactggtgtgtatgtgtgtgtgtgtatgtgtgtgtgtgtgtgtgtgtatctgtgtgtgtgtgtgtcacatgtgtgcaggtgcccatgatggccagagggggttctggatgctctagagctgagttatgggcagttgtgagctgcctgatgtgggtgctgggagctgaattcagagcctttggcaaagcagcgagtactcttaacagctggacatctgttgctatgcttactcacaggaatgacgggacagagtttggtggctccatttaccagaaggtgaacaagaagttggagactgctgtcaatctcgcctggactgcaggaaacagtaacactcgcttcggaatagcagccaagtatcaggtcgaccctgatgcctgcttttcggtgggtacccgagaatcacccatctcacaccaattctatgcttctgcttagacattctctcacagggcaaagacaagtcttgtgtttgagatacttgagacagatactttttacaaagtctcactatatggccttgggtggtctggaacttactctgtagacctcacagagatccacctagtctgcctcagcagcgctgggattaaaggtgtgcgccacgatattgacctccatggctttttgtttttgttttttgttttttgtttggtttttttttttttttttgagacagggtttctctgtgtagccctggctgtcctagaactcactctatagactagaatggcctcaaactcagagatctgcctgcttctgcttcctaaatgttgggactaaaggcatgtcaattttgcttgacacctgcagttttttttttaatttacttattatttatttattatatgtaagtacactgtagctgtcttcagacactccagaagagggcatcagatctcattacggacgggtggttgtgagccaccatgtggttgctgggatttgaactttggacctttggaagagcagttgggtgctcttaccccactgagccatctcaccagcccacctgcatagtttttatatcttcagaattttcacactggagacgctgaacgcttatggaggtcgattgggtagcttccttaaaggcacatagcaagtatgtgctgggacctggctgtaagtagaccgctctgctattgagcctctcttacttaagtgtttcactcttcctctcctttccatttggttttcagtctctacatccacattaagacatcaatggtcaggatgatgtattccagtggtagagcccttgcccagcatgtctgggcttcagccacatttctgggaagaacccaaacaaacagaaacaaggctgggatgtagctcagttggtagagtgcttgcttagcatacagaaagcctgtgctcggtccccagaactgcggaaacagcaggcagaaggatcagaagcaggccattcttgcctatgatgtagcaagagttcaaaggcaactttgggctatatagtgagatcacatctctaaaagagacaaaaccaggtggcctcttgtcttgcttaccccgtggtacccatcagggttccggaatggctcaggttttgttgtgagcctatttgagctggcttgtgttatcactctgtaggtggccacctttttgaggtgggctgaggaagtgtcatgctgcagaatgcttctgctggttggtgtgcctcacagagagtctattttaagtctcctgacctgggaactgagtgctctcaacatgaggcatgcatataaaactgaaagacaaaggctctccttgttgggatgttgggagcataaaggaacagttagaagggacacggcctgctgagagcccttcttctcctcgctctgtccttcaaagttcacaggagcaggaaagcacacacacttgcacatgacacatctcattgagttttaccagatggccatgagcagacaggaacacagttctgatacctgtgacttgcctaagatactgtcaccaagtttggaggtacacctgtgggacagttttcatgggtgaggaacactgtcttcccttggacttaatctttttttttttttttccaggccaaagtgaacaactctagcctgattggcttagggtacactcagaccctaaaaccaggtatgtgttgttgcccatgtgcaaagctcgttctcggttgcattttgctgatgtctgctattgctgagggacattataaacgagtatatataagcttttataattaaatgtttataaaggaagttgtgaagtcattgtaaaaagaaaaagagagtctgagaaatagaaagcagaaggaacctgtctgggctaactcacatcacagctctagttattttctcctttcctttccccagtatgtgatatgtgatagctgcttccagactgtagtcaaaactagcctgtcagtcatcctcacgatggaaagactagggtatagggatgtagtgggtcttctatgcatagttattccatcctctcactggtgtgtgagggctgcagaaatcccactcaaggctgactatgtaatatgaaaatcaagttcttccagggaaaaccatcccgtttgatctaaaattacaagtaagccccaggaaaagaagtttattgtttttttttttgtgtgtgtgtgtgtgtgtgtgtgtgtatgctcacgtgttatgaaagtgaatgtaagactcaggctgttacaagatagggtttccctccaaggcaatactgctcaagcaacttactgagttggggcagcagcggatggcacactcattgtaatgggactgcaggaggctggaagggagggggattcggaagtacgttccagcagggtctctgctctgtgtgccagtgatggccgttgcatgtgttgattcgaggatagcagcaggtcaggttgtattacagagcacaccttgaagggtcgcctcgcttggccactgctgactgcacctggaacagattctgaccttgattctgaccttgatgctaacctctcttctctttcctttgtctcttgcccctttctccctcctccgtcctctgtcacccctccctcccacacctctgtctcaactccccacaggtatcaaactgacgttgtcagccctgctcgatggcaagaacgtcaatgcgggtggccacaagcttggcctaggactggaatttcaagcataaatgaatattgtannnnnnnnnnnnnnnnnnnnctggcctcgaactcagtgatcatcctgcctctgcctcccaagtgctgggattaaaggtgtgagccaccagggaagccatcattcctttcttacttatgggcttttactgtagggaagggcagtcctactcctcccttaaccagttttagtttttattttgatgtattatctttatattttgtctatatatgtgctttgtctacatgtgtgcatgtatgtatgtataccgcttatgtgcctggtgcctgtgaaggtcagaggatgagcctatagtccctggaactggagttacagatgtgtgagccaccatgtgggtcctgggaatggaactcatgttttctgcaagagcagctagtggtgctcttaaccgctgaaccatccatctctccatccctttattatctgaaaaaaaaacacatacacatagatatgtatatatgcacacacataaatacacacacacacacatgcagtttcttctgtgtgtgtgtgtgacagtgtatgtatggacatcagagaacaacttggcaggtttggtttttttcctttttccatgctagtcccagggattcgctcaggtcattaggtttgcctgcaagcacctctacctcctgagctatcttgcctgcccctaatcatttttgactcatgtatagactaatggacatttattcagttgcatcatttagacggtggctcaggctgtgacagtgtggcactccttcaggttgacatgtgtgggctcctctcactgtctttgaggcaccctgtgtttcttgttttggagttgtgtgaagttcatcttagggtctttcttccctggtccttctgtcagccatttgtcctaggcgccttggcgccttatgttgggaatgctgtttaaaggcggtgctgaggccctaggtgtgttgcagatgaactttgatgactttggctcgctgggaattaacactggctttctgaaactctggtgataccgggaaatcactgaccaccctgagccaaatgtaggcactactggatgggaccgcagggccttccttacggattagcacccacccaggagttgccttctacagatagagcctgcttgctaaccatcaatccgtgctgtgtgtctcttgagtgctcgtcaaattagcaccactccttaagtagctaaaaaaaaatcccagcaatttgagacatttgagaaaggaaaatctccatagctgtgctctgggcagatcgcagggggaatctgagtcactgcccctcctctgtccattttcttgggattcttggacccttagctagaatcctatgagaattgatgtgggtggtacccaccattggtcagaggctctgccacaggcaccacactttgtggtcaagggcagctttttgctggttttgtcttttgagagaaggtctcctgtagtccagtctggccttgagtttttatgtgtctgaggctggccttgaactcctgatcctcctgccttcatggccaggtgtgtgccactcatgttttattgagacaggtctgattatgtagcccaggctgacctccaagttatgatcctcttacctctttgggagttggctccctcctccctccatcatgtgggtctgggcgattgaactcaagttgttaggcttggtggcaagtgccagtaccttaagccatattactggccctaaactaattttttttgatgtattttagtctattgccaattcttgtcttaccgatgctaacatttccccatctttgaaggccttgggtggaaaccttattttagcaattagatctgttggcccaataattcctgctaatctctgatagcttaaagagccgcttcaggtttactttgtatgtttgctgccttggatctgtaactggccatttcccaagaaacagcaaggcctctgggtttagagccatggtctgaaagccgcagatgaacccttaatgtcactggataaggccaggaatgggcaactatgtgttgtcttttggagctctgagtcctggtttctgtggtttaggctgagaagcagttggctaggaagtcatctcttttgtaagcctgtgatgtagttctaattgtacttgacagatttgatcttaaaaaaattttttttatctgggcagtggtaggtggcctttaatcccagtacttgggaggcaaacagatctctgagttcaaggctagcatggcctatagaaagagttccaggacagtcagggctgttatacagagaaatcctgtcttgaaaagccaaaaaacaaagattttttttttttaaattcacttgtgtgtatgtggcctatgtacacagtgcctcggtgtgcttgtgggggtcaaaggaaaatctccgtgcttcattttcttaaaacaggctggcttccttccttccttcctttaaaaatactgcatttatttttattttatgtgcattggnnnnnnnnnnnnnnnnnnnnaagcatgtacacacctgcgtgaaagggatgtttttagactgatcctcacaccctgttcccatcgtgccctgttcccatcctagcccatcacttaacctgttttacaccaaaagtagtctttagggtgtggttagctatttcttttgtgccattttagggtggagagggtgggcgtgatggagccagtcattcaggacttaattcttccttgtgttgtggtgtggttttctttcttcttcttcttttttttttttaattccttctttcgccattgcaccagagtatgaaatagcttccgggttctccggctctgagctgggcggtgattgtggtcacaccctgacaacactagggatctcaactgactcctcttgtagcctcaccactattttttagcagtttaatgggtacattatagagtcttccattttgtgtggaattagctcctccccttcaaatgctgtaattaacatcacttaaaataaaacttgaataaaatactgaaacctcatcctcttgttgtttttgttaaaatacgaaatggccagggcattggtttggatttgtgctgtgctcctttgtggtgtctatcaataaatctaacctgatggtagaaaagaacacttgggaggctggagaggtgactcgggggtttatagtgtttcctgcgcctgtagacctgaagcgctcacaacttcctataactatgggtttggggtatctgattccctcttctggtctccttaggtacccacacacatgtgacgcacaaataaaaataaatcttaaaagcacttagggttgatgtagtggcacatctcagtaccttggagattagcacaatgagatcagtgaggaggaaggttgcggggttcaggagagcccacccttagttgaggcactgctggcattgatgactgttgggtgagagtcagttttctttgggggtgtatgcagctgccccaggaagctagggccgctggctggatctaaggagaactgcagtcagtcacaggcagtttgatgagggtagtgggaacgaacggaaccagggtcatcggcaagagcatccagcactgttgaaccaccaccgcctcttccaataatacataataatctcactgttgtagaaggtgtgtctggttgctttgctcaggtttgaatgagaatgtccccttaggctctggcttttgagtacttggtctcttgtaggtgcagtgtggtaaggcttagggggtgtggccttgccagaggaagtacgtcactggtgggtgggctctgaagtttcgcagcttatgctgctcctagtttgtactctccaattcttgtttgtggtttgatgcctaggctttcagtttgtcattcctggtgccaagcctgtccgctgccacgcttcccggccttgatggtgatgggctgctatccctctggaattggaagccaagatgattgccttggtcacggtgttttgtcacagcaataggaaagtaaacacaactaggctgcaccttcattcagcaagagactttgggtccttttccaagcccacgaggttatggtagaatccatttgttgtgaaactgagtcccttcttgccggcttgtttcccgacgaccacgcagtacctggagagccccagcatttcttacattgtctcccgtctgcggtgtatggaacagaaagactcgctgtctaatccttactaggctcctgttctctaggaccaactctgtctctattaccggctcacgattaggcgaggctcccctttataaggataactgccatgaaaagtaagctcaccacacttataactctcattcgcaggctttcccttgtgggccatgggagggggtcgttttgaagtttactcttggtttttcaagacaggattttcctgggcagtcctggaacttgccctgaagaccaggttggactcagagattcacctgcctctgcctcttaagtgctgaggttaaaggtgtgcgccaccactgcctgtcttttttcttttctttttttttttttttttttttttggtttttcgagacagggtttctctgtatagccctggctgtcctggaactcactctgtagaccagggtggcctcgaactcagaaatccacctgcctctgcctcccgagtgctgggattaaaggtgtgcgccaccacgcccggcaaaaatttgtaacgtcttttttctttccttttttttttttagatttatttatttattatatgtaagtacactgtagctgtcttcagacactccagaagagggagtcagatctcattacagatggttgtgagccatcatgtggttgctgggatttgaactccggaccttcggaggagcagtcgggtgctcttcccactgagccatctcaccagccccccaccctttttaaaaaaaaatatttatttatttgatttatttttattcatagctgtcttcagacagacagatccgtagagggcatcagatcccattacagatggtggtgagccatcatgtggttgctgggaattgaactcaggacctctggaagagtagtcagtgctcttaaccactgagccatctctccagcctgcttttttttctttttttgaagaaaggtttaattgcttctatttcacaggtatggatgttttgcctgcatgtgtttgtgaaccacatgcagtctggggcctccagagaccagaagagggagtcagatcccctgtgactggagttacagatgcttgtgagctgccatgtagagctgggaactgaacctgggacctctggaagagcagccagtgtccttaaccactgaaccatctctgcagcccccctctactattaacattttttatgttgtttctccttgtgtgtgcatgtgtgttacagagaacaagcgagggagtctctttcttcctagtttgtgggtcctggggattgaactcaggttgttaggctcggtggcaaatgtgtttacctgttgggctacctcgagatttttactaaatcgtgagttcctccacggaataggaattctacccgcacactcttcagcttctataggaagtgaagtggagacttctggtttctttggaaagtcagttatgtcagcgttttgctggggcacccaggtgaaaggatggtttgctgaagcagatacaggtggaaggatgttctgctatagcagacatgtgaaaggacacatgaagtttagaaggaacataaatctgaccccacggacagtgggagctggagcattggtttgccttgctctcccttgctagtttttgctgacatcatggatgcattggtttgccttacactgcattgctgtgctttgcatgcagtgacttcatagagagaggcttgcaaaagaaaggtccctgcggcttcttgaggcttccgtggcatggggccagttggtgagcctcacagttccttctggattcaactgcagttgctgattcctgtgtggtatctgctgagtggactggactgagaacaacagagactggaatctccccaaagagctatgactaaacatagcttatcctaatagccttccttttccactatctctgctggttggtgggctaagaggggaggttgaactcttattaaaggaggttgagaaaaatatatgcctacaaggaacattcttttttcttggcaggattcctttaaaagaaagaattttattactttctttactctgtctggacatgtgtgggcatacatttggagttcagaggacagttattggaaccattttccccctatctttttgtgagttctatggatgaaacttaagttcaaggttgtggcaagtatcatctgctcttgtgtgagagttgaggcttgttggtcacatcgacagcactaggtatgtatagacgtgcagctaattcttgagtgagtgcttaggctctgaccagagactttaaagaaagtggtttcccggggctggagagatggctcagtggttaagagcagtgactgctcttccaaaggtcccgagttcaaatcccagcaaccacatggtggttcacaaccatccttaatgaaatctgatgccctcttctggagtatctgaggacagctacagtgtacttacatataataaataaataaatcttaaaaaaaaaaaaaagaaagaaagtggtttccctgtccatgtagttgaaggccaggcatagtgtaaagtgttgtgaaatgtataaaagacccccctaagtatgatgggatgtcattcaccaggcacttattacatcatgcctgcacacagtctgcagtgtgttagatggaatttcactgcaaaatgccttgagttcatagtatctcattactgaaaagaactcagatggggctggatgcttcagcaggtagagcacaagatgttcttgcagaggacctgggattggttcccaacatccacgaggctgctcacaactgtctgcaactcccgttccagggcatctgatgcccgtttctagtctctgataacactactcccatgcctaagcctcgaaagatgagacatatacacagacatgaaaaataatctgaaaaatggactcagctgatccatcactgaggacagaagaacaaagtagattagggaggatgatagagggtgttgcagaagccgatcaattgaaaaccatctccaaagaggcagaagctggaattgagattagtctttgtaatggtttgtataggctcagcccagggagtggcactattggaaggtgtggccctgttggagtaggtgtggccttgttggagtaggtgtgtcactgtgggtgtgggctttaagaccctcatcctaggtgcctggaagccagtattctgctaacagctttcagatgaagatgtagaactctcagcaactcctgcaccatgcctgcctggatgctgctttgatgataatggactaaacatctgaacctataagccagcaccaattaaatgttgtccttataaaagttgccttggttcgaaacacacacacacacacacacacacacacacacacacacacacacacacacacaaagagtggccttggtcatggtgtctgttcaaagcagtaaaaccctaactaaaatagtctctaaacactggtattttctagactggcagaaagcaaagctttggggtgcttggagggactgtacctctgctaatctggaaggtttgggcaccattccatgtacatgggctttatggcagactgtgaaatgaggtagatgaatggcttcttggtttgtttaacagaatctgtgtgcttttaagatgtcttggggtcagagaaattggctttgggaaaacacaagctgtttctggggagggaattgcagagacagcagtgaagctgttgggggcacaataaatgccaactgctcattttactgaaaattagtgaaatgaacatatatgaattgaaatctataagaaacattcacacaacatactcacagatggaaactgtaccaaggctctaggcaaactttctaaattcacacttctcttctttctttttctttctttctttctttctttctttctttctttctttctttctttctttctttctttctttcttttttcctgtgtgtgtgggcagggaaagggggagaaagcatttctctgtgtacccctggctgtcctggcactcactttgtagaccaggctgcccttgaactcagatatccacctgcctctgcctcccaaggtttatattttagtgtttcatcaaatatttaacacttctccgtagttaagggtgcatcaataaacaaagtaaggtcaagttggccttggcaggcttgcttttgtgtgtggggcgctgtaagagaggataatatttaaccggatgatagtgttataaaagaaaagcaaggaaattggctagaaagtcagaaggagacactggcattgagaataggttcaaatgttccaaagacatacgtctatcactttttacattttgtaaaacaaacctctcagtatacaaaaatataacccagcaagtgggaggtgaaggtgaaggagttcaaggttatccactgggtagaaagggattttgaatgccggtgcctggcaaacacagaagtggatgctcacagtcagctattggatggaacacagggcccccaaaggaagagctagagaaagtacccaaggagctaaaggggtctgcaaccctataggtagaacaacaatatgaactaaccagtacccccggagcttgtgtctctagctgcatatgtagcataagatggcctagtcggctcggccatcattgggaagagaggccccttggtcttgcaaactttatatcccccagtacaggggaacgccagggccaagaagtgggagtgggtgggtaggggagtggggggggggggatatgggggacttttgggatagcatttgaaatgtaaatgaagaaaatacctaattaaaaaataaaattaaaaaaaaaaggaattttgaggccagcctgggccacttgagatcttgtttcaaaaccaaaaccaaaagggtgctggagaaattattcaacagtttagagcaattgtgcttgtagaggaccagggtgtggttcccaggagccacatggggtggctcataatcacagcaacctccagctccaggggagtagacgccctcttctggcactggagggcatttgaacttacacacaattttactctttctttattgtttctttaatgcttattttatcattattattttttgagacagggtttctctgtgtagccctggctgttctataatcgctttgtagaccaggctggactcgaattcacttagatttacctgcttctgcgtcctgagtgctgaaactaaagatatgcactatcacacctggctagttttaattcagaaatgattgcttgcatatatgtttgtgtaccccatatgcctaatgcctgtggagatcaaaagaggtcttatagtcagatcccctggaactggagttagaggtggctgtgagctgtttaatctgagtgctgggaaccaaacccagtcctttgcaagagtagcaaatgctctcaacagctgaacattctctccagctccatatatatatatataatctttcttaagtgtattaaacttgtgtgtagttgttttacttatgagtttctgcatcagttatacgtctagtgtttgaggatgcctaaagagggcaccgtataccctgggacagatgggtgtgagtcctcacatacaggggtgcttggaatcgaacccaggagctctgggggaatcagccagtgctcttaagcgatgacccctgaaatacatctcaaagatgacaacgataaaccacagagcaaaacaaaaaaccaccagttgaaaataaatccgtcccattcgcctttttttttttttttttttttaagcacccttttctacactcccacgctaacctttcgggttcagagatgcaacgtcatcacgccgggacgtagctgctt

SEQ ID NO: 218 - DNA, 1767 bp, Mus musculus
ccgtagctgccgctgctcccgccgtcaccgcctccgagaacatggccgtgcctcccacatacgccgatcttggcaagtccgccagggatgtcttcaccaagggctacggctttggcttaataaaacttgatttgaaaacgaagtcagagaatggattggaatttaccagctcaggctctgccaacacggaaaccaccaaagtgaacggcagcctggaaaccaagtacagatggactgagtatgggctgacgtttacagagaagtggaacacagacaacaccctgggcactgagatcactgtggaagaccagcttgctcgtggactgaagctcacctttgattcgtcattctcgccgaacactgggaaaaaaaatgctaaaatcaagacagggtacaagagggagcacatcaacctcggctgtgacgtggactttgacatcgctgggccctcgatccggggcgctctggtgcttggctatgagggttggctggctggctaccagatgaattttgagacctcgaagtcccgagtgacccagagcaacttcgcagttggctataagacggatgaattccagcttcatactaatgtgaatgacgggacagagtttggtggctccatttaccagaaggtgaacaagaagttggagactgctgtcaatctcgcctggactgcaggaaacagtaacactcgcttcggaatagcagccaagtatcaggtcgaccctgatgcctgcttttcggccaaagtgaacaactctagcctgattggcttagggtacactcagaccctaaaaccaggtatcaaactgacgttgtcagccctgctcgatggcaagaacgtcaatgcgggtggccacaagcttggcctaggactggaatttcaagcataaatgaatattgtacaatcgtttaattttaaactattttgcagcatagctaccttcagaatttagtgtaccttttaatgttgtatgttggggatgcgagagttgataaataccacgttagacctccaggctaaggatgactcggctttaaggtgtttaccatttcagaggtacagcagaaaccccattccagaaagggtcctttttagctgtaggcgtgggttggggaggagcccctgtagagatgccaggctacaagtggaaagctgggaacatgtgggtcctttgtaaatctgtatccagtccccagatgaaattgtgacttcccgagcatcgaaccctggtgtccagatcctatctgctcggaagcatgtacacacctgcgtgaaagggatgtttttagactgatcctcacaccctgttcccatcgtgccctgttcccatcctagcccatcacttaacctgttttacaccaaaagtaatctttagggtgtggttagctatttcttttgtgccattttagggtggagagggtgggcgtgatggagccagtcattcaggaattaattcttccttgtgttgtggggtggttttctttctcctcctcctccttttttttttaattccttctttcgccattgcaccagagtatgaaatagcttccggttctccggctctgagctgggcggtgattgtggtcacaccctgacaacactagggatctcaactgactccttttgtagcctcaccactattttttagcagtttaatgggtacattatagagttttccattttgtgtggaattagctcctccccttcaaatgctgtaattaacatcacttaaaataaaacttgaataaaatactgaaacctcc

SEQ ID NO: 219 - DNA, 852 bp, Mus musculus
atggccgtgcctcccacatacgccgatcttggcaagtccgccagggatgtcttcaccaagggctacggctttggcttaataaaacttgatttgaaaacgaagtcagagaatggattggaatttaccagctcaggctctgccaacacggaaaccaccaaagtgaacggcagcctggaaaccaagtacagatggactgagtatgggctgacgtttacagagaagtggaacacagacaacaccctgggcactgagatcactgtggaagaccagcttgctcgtggactgaagctcacctttgattcgtcattctcgccgaacactgggaaaaaaaatgctaaaatcaagacagggtacaagagggagcacatcaacctcggctgtgacgtggactttgacatcgctgggccctcgatccggggcgctctggtgcttggctatgagggttggctggctggctaccagatgaattttgagacctcgaagtcccgagtgacccagagcaacttcgcagttggctataagacggatgaattccagcttcatactaatgtgaatgacgggacagagtttggtggctccatttaccagaaggtgaacaagaagttggagactgctgtcaatctcgcctggactgcaggaaacagtaacactcgcttcggaatagcagccaagtatcaggtcgaccctgatgcctgcttttcggccaaagtgaacaactctagcctgattggcttagggtacactcagaccctaaaaccaggtatcaaactgacgttgtcagccctgctcgatggcaagaacgtcaatgcgggtggccacaagcttggcctaggactggaatttcaagcataa

SEQ ID NO: 220 - DNA, 53413 bp, Homo sapiens
tatattgcatggtgctgaggtttggggtatgattgaacctgtcatccaggtattgagcatagtacccaacaggtagtttttcaacccttgcccccctctctccctccctcccctctcttgtagtccacagtgtctattgttcccatatttatgtccatgtgtatccaatgtttagctcccacttataagtgagaacatgcagtatttggttttctattcctgcattcattcactcagaataatggcctccagctgcatccatgttgctgcaaaggacatgatttcattattttttatgactgtgtagtattccgccatatatatgtaccatattttctttattccatccaccactgatgggcacctaggttgactccatgtctctgctattgtgaatcacgctgtgacaaacctacatgtgcatttgtctttttggtagaatgatttattttctttttttgagatgaagtctcactctgttgcccaagttggagtgcagtggcacgatcttggctcgctgaaacctccacctcccaggttcaagcgattctcctgcctcagcctcctgagcagctgagactgcaggcgtgtaccaccatgcccggctaatttttgtatttttagtagagacggggtttcactatgttggctaggctggtcttgaactcctgaccttgtgatccgcctgcctcagcctcccaaagtgttgggattacaggtgtgagccaccgcactcagccatgacttattttcctttgggtggaatggtagttctatttttagttctttgagaaatatccaaactgctctctacactggctgaactaatttacattcccaccagcagtgtataagcatcctcttttctctgcagcctttccaacaactattttttaactttttaataatacccattctgaccggcgtgaggtggcactcattgtggttttgatttgcatttatctgatgattagtgatgatgagcattttttcatgtttgttgaccacttgtatgtctttttatttttatttttttgagacggagtctcactctgtcatccaggctggagtgtggtggcacgatctcgactcactgcaacctccaccgccccggattcaagtgattctcctgcctcagcttcctgagtagctgggattacaagcgcgtgccaccacacctgggtaatttttgtatttttagtagactcggggtttcaccatgttggccaggttgtctcaaactcctgacctcaggtgatccgcccaccttggccccccaaagtgctgggattacaggcgtgagccaccatgcctggctgtatgtcttcttttgagaagtgcctgttcatgtcctctgcccactttttttcggggggtgggatgggagacggagtctcactctgtcacccaggctggagtgcagtggcacgatctcagctcactgcaacctccgcctcccggattcaagtgattctcctgcctcagcctcccgagtagctgggattacaggtgcccgcaaccatgcctggctaatttttgtattttagtagagatggggtttcaccatgttggccaggatggtcttgaactcctgacctcaggtgatctgcctgccttggcctcctaaagtgctgggattacaggtgtgagccaccgtgcccagccctctgcccactttttaatgggggtctttgttttttgcttgttgaattgtttacattccttatagattctggatattagagctttgttagatgcgtagtttgtaaatattttctcccattctgcaggctgtctgtttactctgttgatagtttcttttgctgtgcagaagctcttaagtttaattaggtcccacttgtcaattttgtttgtttgtttgtttgtttttgagacacagtcttactctgtcaccaaggctggagtgcagaggtgcgatcatagctcactgcagcctcgacctcctggactcaagtgatcctcccacctcagtttcctgagtagctgagactacaggtgtgcaccaccatgccaggctaatttttgtattctttgtacagacgggtttttgccatgttgttcaggctgatttttgttttgctgtaactgctttggaggacttagttatttataaattctttgccgcggttgatgcccaggagggtatttcctaggttttcttctaggattttaattgtttgaagtcttacatttaagtctttaatccgtcttgagttaatttttgtatatggtgataggcaggggtccagtttcattcttctgcatatggatagccagttattccagcaccatttattaaatagggagtcctttccccattgcttatttttgtccaacttgttgaagattagttggttgtaggagggtggctttatttctgtgttctctattctgttccattggtctatgtgtctgtttttgtaccagtactatgctgtttgggttattgtagccttttagtatagttggaagtcaggtaatgtgatgcctccaattctgttatttttgcttaggatcctttggttattctggctcttttttttgtttaatataaattttataatagttttttttctaattctgtgaaaaatgatgttgttagtttgataggaacaggattaaatctgcagattgcttttggcagtatggacattttaatgatattgattcttccaatccatgagcatggagtgtttttccatttgcttgtgtcacatagatgatgctttctaactgtgtctttacatggtggaaagggtgaacaagctctcaggcctctgccctaatgataattacatttcaaaagctctgccttctaataccgtcatcttgggactcaggatttcaacatatcaattttgggagtaaacattcatactatagccccattctaataaatcatttctagaattgtcttttagaggttgtatattagtttcctattgctgttgtaacacttcctattgtgttgtaactgtgaaccacagactcagtggtttaaacaactcagatttatcattttacagttctagaggtcaggagtctgaaatcagtctctctgggctaaaattaagtgggcatcagggctccctccttctggaggccttgggaggagaatctgtttccttgtctttttcagcttctataggttgcctgcattccttggctcatggctccttcttacatcttcagagctagcggtgtagcatctccaatctctctctttctttcttctttttttctttctttctctttttctttctttctctctctgtctctctccccacccctgccctgctctgcttctgtcattaaatcaccttctctcactctgaccctcttgtcttcctcttataagaactgtaggccgggcatggtggctcatgcctgtaatcccagcactttgggaggctgaagtgggtggatcatctgaggtcaggagtttgagaccagcctggccaacatggtgaaacctcgtctctactaaaaatacagaaattagccgggcctggtggtgggcacctgtaatcccagctacttgggaggctgatgcataagaattgctggaacccaggaggcggaggttgcagtgagctgagatcacgccactgcactccagccagggtgacagagtaaaactctgtctaaaaaaaaaaaaaaaaaaagaacttgtgatgacattcttgggattacattgggcacacttggatgatctaggacaatccccccatgtcaagatccgtaacatctgtatgatctcacttaaatgtacaatctagaataatcacactcatagaagcagagagtacaatggtaatcttcagggctggagggaagggaaaatggagaggtgatgatcaaagggtataaggtttagttacgccagataaataaattctggagatctatgcatctgacaaaaggtataatatctagaatctataaggaacttaaagagttcaacaagcaaaaaaacaaataaccccattaaaaagagggcagagggggctgggcgcagtggctcacacctgtaatcctagcactttgggaggctgaggcaggcagactgcctgagctcagaagtttgagaccagcctgggcaacatggcaaaatcccatctctactaaaaacaaagaaaaaaatgtgggcagaggacatgaacaggtgcttctcaaaagaagacatacaagtggccaagaaacatattaaaaaatgttcatcatcactaatcatcatctactatacatcacagtgcctacagctaacaatactgcactgtatacttagatttgccaagaggatagatcttaagtgcccctacaaaaaaaaaaaaagggaatgggggtaggggaggaaactttgggaggtgttgggtatgtttatatgctttacggtggtgatggtttcatggaaatatacttatctccaaactcatcaacatatatatattaaatatgtacagctttttgtatgcaatcctatctcaatgaagtagtttttgttttgttttgtttgttttttacattcacaggttccagtgagtaggatgtggatatccttggggggccattgttgtacttaccatagtttgcctccacagtttttaatgttggggttgcagtaatactgaacatagattgccttccattaacattgtaacagaaatatttccccacaggaaatttgttgttgttgttgttgttttgagacaaagtctcgctcttgtcccccaggctggagtgcaatggtgtgatctcggctcactgcaacctctgcatctcgggttcaagccattctcctgcttcagcctcccgagtagctgggattacaggcgcctaccactatgcctggctaatttttgtatttttagtagaggcagggtttcatcatgttgaccaggctggtctcaaactcctgatctcaggtgatctgcccgcctcagcctcccaaagtgctgggattacaggtgtgagccaccacgcccggacccccacaggaagtttttgtaaccatatttcctcaaggttgtgagtgattcaatatgcccaagctggaaaccaggttgtgttccgtcctgggctgctgtccattttcctgcagcaggcattccccatacttacaatgatggtcttagcgtgggttcccagcatcaaggggggtggaataggattatgattctgatcgcatatagcctaattgcttttcagaaggattgtatcactttacacatctcctgatgaacctcatatgactttcttaaagctgaaaaaagttcgctctttttataatcaaggtattatgtcctcattaaagcatatttggaggctgggcctggtggctcatgcctgtaatcccagcactttgggaggccaagacaggttgattacttcaggttaggagtttgagaccagcctggccaacgtggcaaaaccacatctctactaaaaatacaaaaattagccagacgtggtggcacgcacctgtagtcacagctacttgggaggctgaggcatgagaatagcttaactcgggaggtggaggttgcagtgacccgagatggtgccactgaactccagcctgggtgacagagggagactctgtctcaaaaaacaaaacaaaacaaaacaaacaaacaaaagaatatttgggaaatgtaaaaagagccaaaggaaaaaatcactcatagtctcataaatagaaacacaacttaataattatgtttcaatttataagaattgatcaattctggctgggtgcagtggctcacacctgtaatcccagcactttgggaggcggaggccggcagatcacaaggtcaggagtttgagaccagcctggccaacatggtgaaaccccatctctactaaaaatacaaaaattagctgggcatggtgtcgtgtacctgtaatcccagctacttgggaggctgaggcagaattgcttgaaccaggacctgggaggcggaggttgcagtgagccaagatcatgccaccgtactccagcctgggctacagagagagactccatctcaaaaaaaaaaaaaaaaaaaaaaaaaagaattgataaattcccataaatacttcattaatacttaatacatttctttccaatatttgtctctctgtgtatatatatacaaaattcttaaaaatcatagctatgatgttggagcttcttggaattgttttagattagatctaggacacctcatgttttgggatatgcaggagaatattatcaattgtgtttaccttgggatgctttctgtcctgtttccccaagagattactgctgtcactcagaacctggaggcccagctgggtccttccctggatgctgagtgtcagggcacagtgtggggagtgtggcctgagatccttgaccacaaacacgccatcttgattcttcctacccagactctagtctgaggagttcactggaaaatgattggaaagttaggttttatgacaatgcaactttataatccaattaattgatgctggttacaagcagaatatctttctctttaaaaattaatttacataaatgactaccatttctgccttcatgaacttcatcttcaagctctggtacttagcacagacaatgctaagaaaccacatagaaatccagggacatctggctctgaaaagagaagagttgggagtgtttcatcctatgttcttgaaaggggggtggaataggtttatgattctgatcataaattggctgctttccactttgataaatatctacagtagaagccctaaggctgtaagttagagataagacaaaaaccaaaaactccctaaaatgaaatagtcttacattggtaacccattccaatattaacaatgaaagaaaaatctcattttccctggatgttttacattgttcttcttgaatggaggagaggaactgagttagcatctggaagaaaacaatccaaactggactaggcaaaacaggaggccgttggctcaggcagctggtaagtacagggtgtagtctccggcatggctagattcaggacctcatctctgcctttctcttatgggcttacttcattttcagggagtctttattcctgtagccccaggaattctcatctggtctcattggtccatccctgcggggcggggatcgggggcggtgggaggccaggatgtgggggcggagaggcgggggcaggagaggtatacagggctctaattggtcagactgggccatgtggccactcccaggaaggctttggagtcagggatggagtcagctccatgaaagcttgctgaccaaaaggagagggaaacagggtcattcgcccagagaaaaactgaggttaggattgtcctgtccccacaaacctccttctccacccaccaagatttgactgtcttcgccagggacttgctctagctgggtcaagctcaagtggggttattgaagtggaacagggaaacccacgcatggcaagaacaggggggcactcaaggaacaggggcccagagccaccctctgcagcggctgctccattctctgttctgtgaaaagccctcgttaacttcgcaacaccgacagggatgccagacccaggtctccccaagggccttgaaagctcccgcattttcccctctgccatactcatccctgggtttctcagttcaggtttgcaagagaggatctgattgacctggcttgggtcaggggcccaaccctgacccaatcagctgtggcagatggaatggaggtggggctcagggggtttcccctctccctcagggttgtggtgggtcaatggattctagtgattatggcacctgcagatctcagctgattttgttttttaaaaaattactaatactatttcttgagacgggaacttgctctgtggtccaggctggagtgcagtagtgggatgctagctcactgcaccctcgaactcctggcctcaagccatcctacctccttggcctcccaaacagttgggattacccacatgtgcctctgagcctggcccagttactgatgagtgcctactcttttttctttttttttttttttggcagagtttcgctcttgttgcccagactggagtgtgatggtgagatcttagctcaccgcaacctccgcctcctgggttcaagcaattctcctgccttagcttcacgagtagctgggattataggcatgtgccaccatgcccggctaatttttgtatttttagtagagacggggtttctccatgttggtaaggctggtctcgaactcccgacctcaggtgatccagccgcctcagcctcccaaagtgctgggattacaggagtgagccactgcacggggccgagtgcctactctttatgtgtcccattttaaacttacaccaacactctgaagctgaggctcttagaggccagccttcttgcctgggtcacgcagccactaagtgagtggttaatctgaaactagcacctaggggagctggcgaaggggcccagggtagcagaggccatgaagaactctttccaagttgttgtttttttttgttttttttttttgggggggggggacaatgtcactctgtcagtcaggctggagtacagcggctcaatctcagctgactccagcctcctccttccaagttcaagcgattctcgtgcctcagcctcctgagtagctgggactacaggcgcgcgccaccacgcccgtctagtttttgtatttttagtagagacagggttttgccatgttgcccaggctggtctcgaagtcctggcctcaagtgatctgcctgtctcggcctcccaaagtactaggattacaggcttgagccactgcacccggcccagattggttctttaaagcggagttgagaggtggcgctggaggggaggaagcccttcgacatttgctcccagcctcaaaactgggttgcaccggcatctgttcctagccctgtggggttcctggagccccgccttgtcccgcccggcctccctgagttcttgtcctccccctgcccaccagtctcagtgtgcggggtggggaccaccaggctgggaagcccagagttcccaggcaactcgtgcgcctgggagggtcatagaatccgtcctacactcctcaggatcttgaagggggctcttccttacattcccagtcacccctcccccagcccctacacagggcctaggtaacctgtctgcaccccactcccactctgtatcagctgccctcttcctcagcaccctatcccactggagcaccttttccaactccagtcgccacttttaatctgccgccttttcccagcagccagtcctgattgcctcctccgtagccccagttgcccactgctttagatagtgtcgcagctggctgtgaggagtgtcctgattctgtaacccggcacctcctccacagggccctagacgcctcaagccttccaggacgtttgttgatcaaaggcgaaggatgtgcagaatcttcgtccatctacgaattaattctcgaaacctgcttcgagtgggcctcgcgcgtaacacaggggacactcagtggtgaacgagaccactcgcttaggcctagcagcgaggtgaccgttcactcaacacacactaactgggtcccgcaggacacgccccggctggtcgcgggggttacccggggtgccctcagtcggccggccggccataaccggcgtgatctcctcgcgccgagagacccagcagggacctcgcaaaacccaatccacgttttgttttattttgtctttttgcctctcaaatgcatggaaattggctgctagtagctttgctacaggagaaaatcgctaatctgtagtgcaaaatcggcgcacaggggttttctctgagattgtctagacgccgcgcgggcgggtcggaggcgccagacacattgtatccggagcgcggagctcgggagcaacagtcgccgcctctactctgtatctgcgccgccccaggcgcccagtgtccgcgctgggcctgggactgccctcgggggatggggcccacgcgggctttgatggggggccgggggccactttgtccacccaggcgaggcttgggtccagcgccggccacatcaactcccgggggatctagcagcgcggaggccaagcaggaggcccaggagccccgcgcgtcttccattagcgcagggacctccgggccacagctcagagaatcggaaggcctcctcccccttcccgagcgctgccactggggccgaggtttccagcaagaacccgcgtgtccctgcgcacgcacacacggtgcacacgtcagtccggcgcctccccgtgccccgactcacgcaggtcctcccgcgcgcccgcaacacgcccgcaggctcctgtgtctgctgccggggcagcggggcccggaagggtaagaacgcggctcgctagcgggatggggaccctggcccggcctggacgctgtcccgggcggggcctgggggcggagcgcgccgggccgggcgcgcaggaggggaggcgggtccgcgccgccgccgtccgcgccgccccgcccttggcccagccgctcgctcggctccgctccctggctcggctccctgcctccgcgtcgcagcccccgccgtagccgcctccgagcccgccgccacatcctctgaggtaggcgcagcggaaaaggaccccggcttccttgcgccctggacggcgggggccaggcccctggggagctgagagggaggcgctgagggaggagcgggcgaggggccccggcagcccggccgcggggagggatcgcgagcggccggcgcgggcctggctggtgagcgggcgggcagagaaggccgcacaggcgggtgccgaacaggtctgggctggggagcgcgaggccgagggtccagagacgcctgcggctggcggcgagaggcggcccgggcttgcgggcggaagtgcaagggcggccgcgtggaggcccggcgggccgcgcgtctaggtgaccttccccggcggcgccctctggccctggatcccaccagcgtgcatccggcggggacccgttcgccgcccacgctcgccggaccaggccagcgggcgggtgccggccacgctgccgcctcggggatgagctcacgtgacgaccgtggccccgagtccccaggcccacgcgccctggccggcccacgcccgcagaagctggcgcccggcaccgcccgcctgtgccagagccttctagagcggaacgcgccggccgagagtcgacttaggcggtagaggccggagctcgggcctgggctgaaggtttggcctcggaaaaggaggccccacggggaaggatgtggccttcttggtcttaggagtgattactggttcggtcgttcattcattcgccaaatgcggcggtgcattctggaaactgtttcggagcctgactttggattagaggcccgcagtcttagtggtttgtacaaggtcacacagctgggaagtccccataccttcgttttctcatctataggacgggagcaattgtacctctccttcgatgagttttggggaataataaaatgaattaattagcatgaaacctttagaacagtgccggtgtggagaagggctaagtagaaaccctgacacccttggggctttttgggtgaatccagcccatcccccgcagaccattttgctacacgtggcgttgtggaaggggttcaataaatgtagctcctgtttttaaacattctttcactattattgacaagcatttgtataccaggtattgagtaactttcagcttaatttatgaaaaatcttgtaagtttacaaatggacattgtcaagctggagcagtaagtttgcatgtggagatcttgaatgcaggagcagaccctggtttagagcccgttccgcccggggtccctgtccccttgactagcctcccctctcctggggagataggggaaagggctcctctgttgcctaaacttctccactgaggcaggagaaggccagagcagactaccgagggccagccttcattctgcccaccccagctctggaccaactcagctcctaagggtcagactgaggcactgaggccctgtgctactttgtcttcagtgcctggggtggtgctgcctggcacacagtaggtgcttgagaagggtctgtgggggtaaatgcactcttgtgtcagaatccacccatctttactgacagagttttactattccagtacatggcccatagtaggtgcttattgagtatttgtggaattattgaatgggcatatgaagggctgcaggcccagaccatagtcctttgatcctggactttttttttttttgagacagggtcttgctctgttgccaggtctggagcgcggtggcaccataacggctcatggcagcttctgtttcctgggttcaggcaatcctcccacctcagcctcacagagtatctgggatcccaggcacacaccaccacgcctggctaatttttgtatttttagtagagtcggggtttcaccatgtttgccaggctgatctcaaactcctggcctcaagcaatccacccgcctccgcctcccaaagtgctgggattacacgcgtgagccaccatgcccggtcctggacatccttttgagggacacagacatctcacttgtggaaaacagcctcacctagcagagagtcacaaatatttaaagaactgtaacagtatgtatagtctcttgaaataagtgctttaaacacatcgtcttcattctctggttttccaagtcccgagggaaacttgttgaactggtgtttctgggcttgcagggagggtgacatgggtgactgggattctacagaaggtgttgggcctgttaccccttccctcatggtgggtggatggacagcttgtgctggggttgtcctgagtagggtgcctgcctgtgggtagtggggactactccttgttgattatttagttttatttttgctattctagagtggggctataggcaggggttattcgtagctcagaaagtgggggaccatacagggatgaggtgcctgtgggcccctggccttgctgaacactaggcaggtgtggacagtgaactccatgctggggaggtgaagggcatccaacctctacccttaccaggaagatgctcctgaagcactgaagtccacttcgcctttgatggaatttcccgtggtgtagtgtcttcggtggtagtgactggaagaggcgcatgtgtggttgaggaccagccgaagcttggaggcagcccctcctggtgctcagagattctgtagtctgcggctttgggttttccatggagtcctgtggtagccactgagaaaagttgaccagtgggctcctcagctgggtctgggcgcatttctccattttaccacgtactcagggggtttgggatgagtgggactttaagttctttactcagaactgtgctggaaagagcactggagagtagcttaggcccataacacaggtctggtgagccatagggtcggtctcatacaggtcaagtcactgtcttgtgcctcagtttctctctctcttttttttttttttttttttagatggagtctcactctgttgcccaggctggagtgcagtggtgcaatctcggctccctgcaatctctacctctcgggttcaagcaagtctctgcctcaccctctcgagtagccgggattacaggcgcctgccaccatgcctggctaatttttttgtattttttagtagagatggggtttcaccatcttggccaggttggtcttgaactcctgacctcctgatccacccgcctcggcctcctaaagtgcggggattgcaggtgtgagccactgagcccggccgagtttgtctgctataaaagtatgattgtcgtcattacagtgattgctgattgagggcttgctcagcacctttctgggggctcaacgaatgttctgtgatgttgagttcaccaccctataccctgggagagagatagtgtgtttccatttcacaggtcagcagactcgagcacagagaggtgaggtaacacagcctggcaggagtggagttgggattcaaggcctggtctgaatggtggtgctctcacattgcagttgcactccaagggacccttgcaaggtgctaacagatgtgaatgccttttggaaagtcaaaattggtgttcagatgggagacattatttttccacaccagtcagagtgaacttgtgcatggctgtgtgcgggccaactggcagtggacaatggagtcacctctatttcttgcaaggacagtggtgctgagtgtctattataagggtccgttttccctgggatctggtgggaggcattctttcaggacctgttcagctaaacaatgcctcattgtggacatgaaggactctggaccctgtggttcagggtgaccttttgaacatgcttagcagccattattataataaatatacaaaatgaaaacttgtgataaaatactgtgtgtattccctgcttaccaagcgccagccactgtaccaagtgttgtatattaacgagctaattcagtcctcacagtgacgccaatccaggctctctttctccatattagagctgaagaaaaaggagtagagaggttgcgacttgcccaaagtcacatacctagaaagtggtggggtgggttagaactcaggtctatttgattcccgaggcttcctgcccaagcactgtctgtctcaaccctacctggtcaagccaagcagtgaggctccagggaacttgaggtgccttaggtcaggtaggagccccaggtatgcctgggatccagaccatagtgtactggctgccagcgcaggccatctccccttgataggtgggtgggcaggctgccctgagtcagcaacctcctgagcccaggagctcagcatggaactcagctgtgctggtggtggcccagctgccagggtgtttcaaaatagaagctacccctggaaagctctactgcccactgcgagactgttgtggaagaatggagggagagaacagctgcattgggtacgcagacctgctaccagaacacagggccatcagcctttgccagcatcctggagcttgaaccaggaactgttcccctgggttgtttcttcctggcaagaaagagaaagtgctggagtgtgtgtgtgtgcatgcgtgcatgtgtgtgagcgagctgctgattgtgttcgcccccatgttggcttttagagctagggttgccttctgctggggaagttgcttttcctggtcctcagggctaggaagaggtgctgtttctgtgatcactggctggtctgatacccctcctataggctggcctagttctgccctgacaaaccacctagaatggtgttggtgaaacagcggggccagagacttttccatagtactctcttccttggcagaatcataagatgatggcaatgatgatgatgatggttgtgattgctctgttggttagcgtctttgcagggatctggtgcacacttacacttggtaatccaggagagtttaatgaagacatcatttgcaaagctgtggatggggtgtcaggtctggtctgttaacaccctgaggcctacaagagagggagcttcttggcaggagctgtggccttgggtagaggaaggtagtcattgcccatctgaagcctagcagggagggagactcggggtgagtaccccgacttcattcttccctaaactcccgtcttctgcaagtacctcacgttgaaaggctaagcccaatcataagcccatggacagcagtccataatgatcagttctgggggcacagagcagggtggaagggaggagaatggatctggaggggcagacagagtatccagtgtagtggattatggttattactgccatttgttgaacacttactccatgccagatacttctgctgttctgcctgtttcactcattccttgtaacaacttccttaggcctaaggcctttcctcccagctgtttttagctgagtcttggagacccatggccaccctgctccctgtatcaaccattgcagtagttgttggctctctaggggtgcaaagctcatctgcctgaatccttctattattactatttatttctttttattttttatttaaaagagacagggtctcactgtattgcccaggctggtctcgaactcctgcattcaggcgatcctcctgcctcagcctcccaaagtgctgggattagaggcgtgagccaccatgcctggcacatgcctgaatccttttgagggagcctctgcagagaagagagcatatttctaccaggcgggggcctggtaggtgcttagtgcaggaaccgccctgagctgctgcttctcagtggcacctgggggcagccctgcctgttaggcacaggctgagaggtagggcaggaggagttccatctcttctggcaggctcttcttgaacaagcgcctccggtgattcttgtgcaccctgaagttagggagctctttcctgctcatgatttctggcagggtggccaagccactagtggtcacctgggagtgaaatgtgccccgacggaccttgcctgataactcttccatctcagtgtagtttaaatctgttcttgcaatctgtatggacactctaggtagccttctggcattgctactgcagcagccttggaacgtgatttgggacacaacacagctcaatttcaggcacagtggttggcttttaaagtgctgtttttttggagagggagtctctcgctctgtcacccaggctggagtgcagtggcacgatcttggctcactgcagcctttgcctttgggttcaagtgattctcatgcctcagcctcccaagtagctgggattacaggcacttaccaccacgcccggctaatttttgtattgaaattctttatccttaaacaaattattagtatacacaaacagcttaaataatgaagcagaacaaaaaatgaaaattcgatttgaagtgcattccttccctaaacctccttctccagaagcgtatctaagccagccccaatttgcagattggcttgtatccttccacatgctttcccatccattcatgaacatagaaagatgtgtaaaaaggttttcctccaattacatggaattacaaattttctgacttttttcatttaactgtatcatagctagctagctttctttcttttttttttttttgtttcgagacggagttttactcttgttgcccaggctggattacaatggcgcgatctcagctcaccacaacctccacctcccaggttgaggcaattcttctgccccagcctcccgagtagctgggattacaggcatgcgccaccacgcctggctaatttattttgtatttttaatagagacagggtttctccatgttggtcagggtggtctcgaactcctgacctcaggtgacccgcccacctcggcctcccaaagtgctgggattacaggcatgagccactgcgcacggctatcgtagcttcatagctagctttctatgccaccacatacatccaccttattcttttttttttttttttttttttgtgagacagtctcgctctgtcatccaggctggagtgcagtggcatgatcttggctcactgcaacctctgcctcctggtttaagcttgtgcctcagcctctcaagtagctggcattacaggcgtgcaccatcacacctgggtgattttttttttttattttttttttatttttagtagagacggggttttgccatgttggccaggttgatctggaagtcctggcctgaagtgatccgcccacctcagcctcccaaagtgctgggattacaggcatgagccacccaccttattctttttgattaccatatggtactccttagtttgcaagtatagtaccttaatttttattcattcattttccttttgatggacttttaggttgcttctgggttttgtgttacaaatactgctgcagtgagcatcctcatatacacatctttgagtagtgccttggttgctacagtggggcaggttcctagaagtggaattgccactagggttaatgctgggttaattgctctccaaaaagagtgtacctgtagtactcccccttggcgtgaacaagagtgactgttttccacaccctcactgacactggatattatttacgtttttgccagactgctggttaagtgagcttctgaaacacagatgtggtagtcactcaacagtggctcttggtggcccttagaataaaatccatgcatggtattgaggtcagaagcaaccagtgcttctgatggcacttggtctcctcagcctgagatcagctctccttaggccgaggtgggagcaggcagggagtggaggtcattgctagttgagggtctccccaactcccccactcttggtgatgctgcaacagtgagcctgcagagggagctcttacttcctggttgcattgtaatgagttcctattgtcagattccaagtttctacttttttccccattgctaaataatactttgatgctcattgctcattcactcatcaaacacatttatattgaatgcctattatgtgccagggcttagcatctttatatacgtaactttttccatattttggataaatttatgcatgacaggctctggggtgctttgaattcaaagaggtgattttgggggtaggtgtatggggtagggtggggtgggggcacggtgagcacagcagctgtcattgccattcagctgatgagccaagaaggatgtgtacccccaagacagaggttacgtaagtattatgcagactgtgctgggtgatagatacactatccttcccctctgtgcttccagtatgggccggattttcattcctcagctggaatggggcttgcataatttgttcaaggtcagccaaggaaaggttgggtaggtagactggcaggctgtggaggggaaccagggactcctgtatcctggtgtgacttgctggtccttctcaaagtcttcagtgactgcaggcaggtctgctcagcctggccctgcccatccctctgtttcctaccaaccagtgggaacaaagcccccaggctctgccctgaagccatcactcaggcagagaggcctgtggttctgactcccccaggacgccctctgacttctgtctgtccagggctagctgctttgccgatgccagactgccctgcttcatgcgcagcctctagaggctcagcttgtgaaggcccctggggggtggatgctgcagagacagctgtgtatcagtagctaactgtacaggctccgatttggagcagatctgggtggaaggagtgactgggaggggtgggggccagggttcagccttcaagtcagcaccctggcagggtgttaagtgaaagcaggctttgttgccgacttttctttcctccagtcctcgccttagaaaattaatgcagattattatttctatcataaaattgtctctgaaatgggttcgagagctgtgtaaaaatgggcattttgggggtgctgtctgtagctgtaagaaagctgaacttctcggagcggcagagctgtctcgggccttccttagttccgtcagatcagtgcagcaggggatgggccgaagtgcacaaaaaggaggggaagctaccactacctggcagttgggggcctttagtgaaagggtgagtcatccttttgctgtcctcggtggtgtcacttcaggcccaggagtggacttgactccattcagccagtggtttctgtgagtcttccttgccaggtgctatgctggggagaatgcttacttgggggcccagaacgggggagattatgcttcattgtcggtgttcaaggagatggggaagagagcaagacacagatgagaaagccagcatccagtatgtttacagtgaggcattggatagggatatgttttagtgaaccagcaagttcacttgcgtgctgctggtaccaactacatggttgtgttgtggaaccccacagccccaaaagagcttggccgtgtcggagctcctagaggccccaggaggggtccggtctgctcttctgagctctgctctctgagtgccttgtccttgggtggtaatctctttagtggccttgtacttcaggctgatgtttgctgtgggtggggtgttttttgacaggtggctgtgcttgttggattttggggattagcgatgagagagggcatttggggaacatttaatggatgagtgctctgcctttatcctgagcggggaccagtccagatgtgaaggctgctgtgtctgggaggcgtctcttctgtggggtcaggggagagtcgtggggaaggctctggctcctaaggtccagggaggtcttaggtgacccacagatattaccactggactgcttctccttctgcttccccagcccccaccccggctgagtttgtggcccccctgggaggcatagcactgaagaggggtacttggttcactgatggtttgttaaccctgtcgggtggagaatgttctgggcccgttactgttatgttctgtgtctgcctggggttacattgcctcagctttcaatccagagttgttctcctaggaaggtgtcaggtaaagggtatttcttgaggttctggtgggtggtttcctggtctatcccggggggatgcacctacagggttagtttgggagggaggaacaagtggggagaggggagcccccagactggaaagagccagtggcgggcagtgtaaaatggatcttcccccctcatctctctaccctgatactaatgtgggctgacctgtccatggtttcagcctgatcatgtgcaagaaataacacagcagcgacaaaaataggacagagtaaacagctcgctgctcttctgtctgtgctctgacacaaaagtgagctgggataaaattaacaaagcatctggaaaaagtaaagtaggacctggatcacaacttcacaatttaaaattgtagaagtttatactgtttcttttacaacatactcaatgagtctgtggcctcctgcaatgcctttgaagttaaagctttggccaagaatgcaacttccattgatgatatggaagcatatcatgtcatatgacatgccaggagcatgtcatatatgtgtttatttgtgtgaatatatatacatgtaacttcagatggtatatatgcagatgaattttgataatttaggtatactgtattttaaaacgaatggaatggtccttctggttgagactaatgattctggggatggagaaggtgcaggagatgaggctttctcatgcatgaccccctctcctcctgggcagagcacaccatgtacagtcccagattaggatattaatcctgtgtacacagcatatacagcatgccaaagcaaagccttccaggaatgcagtgtggtccttagggcaaagactatttgagttactctccttccttgaacaccgaggtgcttaataaatgtttgttgattgacttagtgatatgcagcaatcccaagtagtcctttgatggttggttttaaaaataaagttacactggagctcaataaatatttgtttaatgtatttggaggatgtatttgggttttttccatgtgaagagctgccaaactggtttggttttactgtattctctatgagaaatatgaagtgggttcccataaagtccaaaagttttgtgaaaagttgggcccatcctggcatatagtaggtactccataaatatttgttgaatgaatgaaatcagagccacatggaaaatgatgttcccatgaaaagctctgatttctattcggtacatttaatgtcctagtagctgacattttgtaagatgatatgttttattggcaacagtcctacaattcagtaaagtcactggctcatgggaatgtgtctttgacagtttattcattaagcaaatatttcctgactcctactctgttctgggcctgggctcagtcctggggatgctgaggaggagaggtctaaattgttgatcatctgtcaacaaagactcattgagtgtctcaagctctggccacaaaatgaaggacaagacagcaagggcttcttggcccatctgggaggataagctacctggtagtcttagtgctaggtgatttttattggttgctaattacatctaataattgttattgatggaaagctaatttccctaattatcaatgcatttattctggtgattcttttatcatagcagaagatggctgtgccacccacgtatgccgatcttggcaaatctgccagggatgtcttcaccaagggctatggtgagtgttgcagagagggggtgcctttcagctcacagactgagttggcatgtttgagactttaccgataactgtttaggagacctgggtaggtcagctgttctgaactttcacgtgagggaaaaaagaagctttcatttgtgtggcaattgtagcaactttggttgtgcacccagttggacaggctcctgcattggtgctgtcaagtgggtattcttgttttcttttccaagtgtggagcagccctgtggaagctgctgcagtggagcgcggcttctatatttagcctgtgcttaggcacatgcccacgaggcccagtaactgtgtctttgccagctgtcaggtgtcttcttatcagaccctgctgggagtgcaggtgggacccaggtgggggtgcccattctgtctgctgctgttccatggcagctgagagctccccccacgagcagcagcagagactgggtgccctcagcccctgtggcaggagtgtgcttctttttaaaaaagcatcctgaagcaaccatgagggaggcagaggtgctgttctctagttatttaacctattgacagttgtcttcttctttctttaggatttggcttaataaagcttgatttgaaaacaaaatctgagaatggattggtaagttgtccaacccacatggaacatgagtatttatttatttttattttattttatttatttatttttgagatggagttttgctcttgtcgcccaggctggagtacaatggcgtgatctcagctcaccacaacctccacttcttgggttcaagcgattctcctacctcagcctaccgagtagctgggattacaggcacccgccaccatgctcggctaattttgtatttttaatagagacggggtttttccatgttggtcaggctggtcttgaactcccgacttcaggtgatccgcccaccttggcctcccaaagtgctggaattataggcatgagccactgcgcctggcttatttttatttttaaaaaagattttagattcagggtgtacatgtgcaggtttgttacatggatgtattgtgtaatggtgaggtttgggcttctagtgtacccattacccaaatagtgaccattgtatggaacgtgggaatttgttgtagatcaacaaataactgtcgtgacctggcccgcaaagccaaaagaaggtacttttttttttttattctggcagtttttgtggttttcacattcattccattttctgcatgatgggtggtccaggggaaccatgccagtaggcccccagttcagcagcgggtaatagaggagaatgggtcaggtctcagttttagttttccttgtgcttcttattttcaaattcacctgcattcaaccacataagtgtttttaaagtaatcttagtagtccctttgaaattatgtgtgcagtaattgttggaagaaagaagttttgggtttgaattaccgctgtgtcagctttagctcagtgctttttctctgtactgccctggagccaggatggaagggagatgctttcctgtccagactgaagagttacagggaggaaggaagctgtctgctgacaacaaattccccataagatttctttacatagcaggctcctttactcccatctgtactttaaatatctatttgaattgtagagttagccttggcccccccacattcagggtcttgcctcttgcagaaaggcaagtatagtgtttaggagtgaagtgaagccaagtgagtgctatggtgcaggctgtgactcttctctctcctttgaaggaatttacaagctcaggctcagccaacactgagaccaccaaagtgacgggcagtctggaaaccaagtacagatggactgagtacggcctgacgtttacagagaaatggaataccgacaatacactaggcaccgagattactgtggaagatcaggtaatggctgctgtgaaaagatgtggatttattaattcgcatctgccagcctgccttgtgactaaatctagtggcaaatttcttttctgttcagcttgcacgtggactgaagctgaccttcgattcatccttctcacctaacactgggtaagagtttcatctgttttctccacaaggatgttctctgatgttgcaggtggtggaagccctttgtgacaaaatgttttgggggctgacagcacctaaaatatggtctccgagacctggcgatttaagtcctctggttttgatttggtcccaggggtcgtatccacatctatgcactaacagactatgctataatgagcacttcctaattcaggactggtgtttacccaacaaacgatttctaagtgccacctgtgcttggccctgtgcccatctggagatctaagggtgcccaggccatgattgttacccgccaaggagctcactttctaatagaggattcagaccagtgtttagccgtgttttgtaataagattctgcattttgttagtgttctcctagtttctgccatggaggttgcaggatttctgttcagtaatagccatttcatgtgagttaggctgctggtgatgtaagtggctatgaccaaacgggagtgggtgacatttggaagcagggcctaactggtcactgttgccagcctcatttcttcaggcatggaagtccttctcccagcttcctgctgcttagggacactgagaccctgtgggtgtaactgcaaggtggctcctgaggctgcactttccccaggccttctggccacagatgtaataggcttgttagttcttgaccatcacttggcatgatagcatggtagtctgcctcaattcctgggtgcttttcaaagtgcctagaaggaattattcccttttagaatacacccttgtttttttccactcatattggtgggtcttccaaacctggggaagatgttttatatagtgatgttagggtcaagggcatgtactgaatttcagtttttaaaaattgtgggccgggcgtggtggctcacgcctgtaatcccaacactttgggaggctgaggcaggcaaatcacctgaggtcggaagtttgagaccagcctgaccaacgtggagaaaccctgtctctactaaacataaaaattagctgcgcctggtgggcgcatgcctgtaatcccagctacttgggaggctgaggcaggagaatcgcttgaacctgggaggcagaggttgtggtgagccaaggtggtgccattgcactgcaccctgggcaagaagagcgaaactccatctcaaaagaaaaaaaaaaaaaagagtcggatgcagtgactcatgcctgtgatcccagcactttgggaggctgaggtgggtggattgcttgaggtcaggagtttgagaccagcctgggcaacatggcaaaaccccatctctaataaaaatacaaaaattagccaggcatgatggtgcgtgcctgtagtcccagatacttgggatgctgaggcatgagaatcgcttgaacccaggagacagaggttgcagtgagctgagatcgcaccactgcactccagcctgggctacagagagagactctgtctccaaaaaaaaaaaaaaattgtggtaagatatacatataaaacttaacatctttaagtgtgtagttaaatggcactatgaatttttcagttttgccattcattttttttctttcttccttttttcctttccaacagatatttattagagggaggatctaccaagtgcagacctgtgctgggtgtgcagtgcacacaagtgactgggcacacagggttcctatcctctggagatgtcgtcttatagcttggctatagatgatctgaagagaccattgttacggggctgatttactctcattcctcttcgctgctgtagtttctcctgcaagagcactgcctttttgcagtgctgtgcactctccccccaggaactctgccatggtatcagggagcggttatctggaaagatcctgggataggatgagaggctggaggatgtgcccacatgcttgaatttgctgcctgggactttgcctgctgccctgggatagcacactttggaatttgtaggcgatttccttcccatgaccttagggagctttgcagaggtctccaggccatgcagtataaaacacaaaggaaagttttttggttttttttttttttgggttgagggggacggagtcttgctctgtcgcccaggctggagtgcagtggtgtgatctcagctcactgcaacctcctcctcccgggttcaagtgatccttttgcctcagcctcccaagtagctgggactacagacacgggccaccatgcctggctaatttttgtatttttagtggagacgggggtttcaccgtattggccaggctggtcttgaacttctgacctcgtgatccacctgcctcggcctcccaaagtgctgggcagattcatgtgtttctcctgcctcagcctcccgagtagccgggattacaggaatgcaccaccacacccagctaattttgtatttttaatagagacagggtctctccatgttggtcaggctggtcttgaactcctgaccttgggtgatctgcccacctcagcctcccaaagtgccgggtttacaggcgtgagccactgcacctgccccccttttttttttaatttactttttatttcaaaataattttatacttagaaaaaaatgtggcaaaaatagtatgcagagttctcctgtgttcttcacccagctcctaatgttaatggtttacgtaactataatgatcagaatcagcaagttaatgttgatatcatatagttaattaatctgttgtcacaatgacgtcttttttctgatctgtgatccagttcaggttcctaaattgcatctaattgttaagtcttctctaatctggaatattttctgactctgacacttttgaaaaagagtggccaattattttgttaagatgtccctcagtttggatttgtctgatgcttccttatgattaaatttaggttatgcatttttggcaactgtagttgttgtgttatattcttctctgcacctgatgttaggaagaatatatcagtaggcctcatttttggtgatcagttttgaagtggtgtctgccaactctcttcattgtaaagctactatttttctctttgtaattagtaagtatcttgtgggtagacactttgagattatgcagatattctatttctcatcatacttttgctcaaaaatagtaacatccattggtgattcttgcctgcaacagttacgcttggcaaatggtgactggagtgcagtggtgtgatcctggctcactgcaacctctgcctcctgggatccagcaatcctccttcctcagcctcccaagtagctgggaccacaggcgtgtgccaccaagcccagctaatttttgtatttttagtagagatgaggtttcaccaggttggccaggctggtctagaacttctcagctcaagcgatccacccgtctcagcctcccaaattgttgggattacaggtgtgagccaccacgcctggctacaaatggtgattttcttttcttttttgtttttatgagatggggtctcactctgtcacctaggctggagtgcagtggtatgatctcggctcattgcaacctctgcctccctggctcaagggatcctccctcctcggcctccccagtagctgggactacaggtgcctgctgccacccctggttgatttttatatttttggtagagacagtgtttcaccatgttgctcagtctggtctcaaactcctgactcaagtgatctgcctcccaccttggcctcccaaaattctgggattacaggtgtgagccaccacacctggcctcaaatggtaattttctattgccatccttccttcacttgttaattggtattctaccgtaaggaagagctattccttcttccccatgtatttatttaatcaattatttatttatattagtatagatgcatggacatttactctatgggctataatgcacagtgtcatttattttgtcgctcaagttgtcccagatatgggctttgggagaatacactctgtgtgctttttgacaaacctctgtcgtttttcagagcatgtctttatttctggttttagaaagtgtaccacgctcatctagtacttgtttttccccagtcctgctatctgccatttctccaaggagccttggttctttatgttggagaatgatatttagaaactaagattgtaggcctggcgcgggggctcatgcctgcaatcccagcactttggaatgctgaggcaggtggatcacgaggtcaggtgtttgagaccagcctggcaaaaccctgtctttactaaaaatacaaaaattagctgggtgtggtggcgcacacctgtaatcccagctactcaggaggctgaggcaggagaattgcttgaacccaggaggtggaggttgcagcgagccgagatggtaccactgcactccaatgtgggcgacagagcaagactccatctcaaaaaaaaaacaaaactaaaattctgggtgctagatgtacataatgctactgggtatttgaggaaagttctggtggtgcatcatggagattagaaacgaaagctggctttccaaagtgactgagggtacagcctgggaaaacacctggctcccaggaggagcggagtgtagaccacatctggatgaggccacagacctcaataaggaccagcacccacgctgagtatccatcacaaataaagcttgcttgttaaccacaaatcagtcaggcctctctcgggtgcttgtcaaattagcactactgttgaaatagcttaaaaataaatcccaataatatctgaaagaggaagactccacagacatggtgtgcagtgttagaaagagacctggagagaagcctgagccactccccagcactgccctttctcttggggattgtgggccctggccagaatccagtgagacagtgggtgggggtgccatgtcaactggtgcaggtggtgcacaccactggtcagaggccctgccataggcatcatagtttgtgatcatcagcagctttttattaaaaattgaaaaaggagatggttagaagatgcctgattttatatttccttttccctttgtaaatgtcagcctctcaacagctgtctaatcatcagtcatctcaaccagcctggtgccaatcacatacttggctgaaacccagacttctttccccaaagagcaggcagatgaagataggtttctttttcttttttcttgagacatcttgctctgtcgctcaggctggagtgcagtgatgtgatttcagctcactgcaacctccacctcccaggttcaagcaattctcgtgcctcagcctcctgaatagctgggattacaggcacatgccaccacgtcctgctaatttttgtatttttagtagagacagggtttttccgtgttggccaggctggtctccaactcctgacctcaagtgatctgccctccttggagtgctgggattacaggtgtgagccactacgcctgaccagttttggatttttcttattgagagataatttggttgttactcctttccttcaaaccttgccaaaatgtacagaagtaacttgaacaaaattgaggttccaaggcataagtttcattgtcacttgttctgttggtgagcaggtctgtgcacacctactcccaactgctgagggagctgagcagccaaagaaagagactgacaaatccagtttctcagaaagaaacatttaatagagacttacaaatagaagcgatgtctcaagcagccaagagacagtggatccctgcattcatcctccagaaagtattctttatatagcaagcttttagagtaaagacatgtgcatgtcttagaccatcttgcagaaaactcttgcaaaacttgtgaccaaagggaggttagataagcatctttactttttaaatttttatttatttatttttttgagacagtctcactctgtcacccgggctggactgcagaggcgtgatcttggctcattgcaacctctgcctcccgggttccagcgattcttctgcctcagcctcctgagtgtctgggactacaggtgtgcaccaccacacccagctaatttttgtatttttagtagagatggaattttgccatgttggccaggctggtcttgaactcctaagctcaagtgatctacctgccttggcctctaaaagtgttggaattacaggtgtgaggcactgtgcccggctggcattgtttcttttatgggattgtctatgatgcattccttggtcgtcatggctgtattaggctattcttgccaggcaaggtggctcacgcctgtaatcctagcatttttggaggctgaggcaggcagattgcttgagcccaggagttggagaccagcctaggtaacatggtgaaaccccatctacacacacacacacacacacacacacacacacacacacacacacacacacgctggtcattgtggtgagcgcctatagtcttgtccttgcattgctctaaagaaatacctggccaggcgaggtggctcacacctgtaatcccagcattttgggaggctaaggcaggcagattgcttgagcccaggagttggagaccagcctaggcaacatggttaaaccccgtctacccacatgcacacacacactagctgggcctggtggtgcgcacctatagtcagttctagctacctgggaggctgaggtgggaggatcacctgagctcaggaggtaggggctgtagtgagccatgatcgcaccactgcactcctgcctggacaacagagtgagaccttgtctgaaaaaaagaaaaaaatacctgaggatagctaatttatgaagaaaagaggttcaattggctcatggttctgcagtctgtacaagcagagcacaggcatctgctcggcttctgggaaggcgtcaggaagcttttagtcatggtgattgatgaagcaggagcaggcacatcacatggcaagagcaggagcaagagagagagagtggtggggaggtgccacacgcaaacaaccagatctcataactcattattgggaggacagcaccaatccatgagggatccacccccatggtctaaccaccacccagcaggtccaacactggggactgcatttcaacatgagattcagaagatacagcatcgaaactgtatcagtggtgattttgtttcaagacggtgtcactcttgccatggaacaggctattttcctacatcacttgggaggggtgctggctttattttcagctgtgacctctaaaattcttgtctcattgagaatttggaatttttaacctttatttttttttaatgagaaatctgaaacatacaaaaatatacagaaaaatatgtttaaccctcattctattcctatcacacagctttgatagttaccaacctgtggccaatcatgttttatttatacagccataaatataacactcctccacgcacatactattttaagtaaataacaacacttaatttcagctgtaaatattttattatgtatctttaaatggcaataatccattttaaaggagcataaccatgatattattattatattgaaaaaagttgatcatttctttttctttttttttttttttaaagatggagtttcactcttgttgcccaggctggagtgcaatggtgcgatctcagctcacgcagcctccgcctcccgggttcaagtgattgtcctgcctcagcctcctgagtagctgggattacaggcatgggccaccacacccggctaattttgtgtttttagtagagacgggatttctccgtgttggtcaggctgggctcgaactcccgacctcaggtgatccgcctgccccagcctcccaaagtgctgagattacaggcatgagccactgcgcccagtggatcatttcttaatattgtcaaatctctagtctgttcaaatttacatgattgtttcatgatttttttttttttttttgagactgagttttattcttgctacccaggctggagtgcagtggcgcggtcttggctcactgcaacctccacctcctgggttcaagtgattctcctgcctcagcctcccaagtagatgagattacaggcatgtgccaccacacccagctaatttttgcatttttagtagagatggggttttgccatgttggccaggctggccttgaactcctgacctcaggtgatccacccacctcggcctcccgaagtgttgggattataggcgtaagccaccgcacctggccttttgctgtttttaaaataacaggttggttctttagtctctaaagatgacagctatgtgatttgagcgttattataattcttttttttttttttttgagacggagtcttactctgtcgcccaggctggagtgcagtggcgcgatctcggctcactgcaacctctgcctcccgggttcaagcgtttctcctgcctcagcctcctgagtagctgggattacacacgcccaccaccgcgcccagctaatttttgtgtttttagtagagacggtgtttcaccatgttggccaggctggtctcgaacttctgaccttgtgatccacctgcctcagcctcccaaagtgctggaattactggcatgagccactgcgcctggccccgagtgtcattataatgcctagaataaacatactgtttaatatgtttcagcctattgctaatatttttcttattgaggctcacattgctccattgtcgaagcccttgggagcctcttcaggttaccttgtaagtccttttgcctccaccccagtagtcttcaatagctttgatagatgttttaggttactgtgtacatttcctgcctaagatctgtagttggccatttctccaaggagcactggttccatttaggaggaaatggtctaggtgctgaggatgaagcattaatctcaatgtgaataaagctagaagtgaacagtgctgtgtagtccttgaggctctgagtggatctggttcctcctgtggtctctgctgagaatgcagcttcctgtgggagatgtcgatcttgtaactgaatgatagagacaatcagataaaaatgatccatgttgtatttgttggatgtgatcttgttctccagtgtgtacttttggtaaaagacatggtaataataggtctgcaggtgacactattcacctgctcttcctaagggatgctgggtcttgaggaaccggcagtagagacactgaactgcttatagactcacatctggtatcatcaggttggacctgggatactgtctggctaactaacacttcctggcccccatgactgcagagttccaggttctacatcagtacccggttctctgaaatatgtactcattggggtctcatgaatatggaattgaaatccattttactgttgtactcacttagagggaacatagcctttgtttccttacttaaccatgtgagccacagagtaagaagaaaaccgtctctttaaaagctgctatttaggtagctgccttcatggcagataaatcttttccacaggtttggaaaatatcaaagatgcatctgtttcataattacatggtggctttctacctaatgaatgcctgtgtaggctgctacgttaagcatacaaagaggataggagaagaaagttacttcgtatttatttttcaggcttttcctgtctgtgttctcacttcgttattgtggggtttctgcagactgagtccctgtggaagagaggttgtgtcctgctcattgtggtacagcagtggcttaagggagaactggagccctgacttcacccccaccccactccctttatttgacctgggattaaaaaaaaaaaaaagacaacttgcatttcaaggtgagttagcttctgatcttaatataacttattttccttcaggaaaaaaaatgctaaaatcaagacagggtacaagcgggagcacattaacctgggctgcgacatggatttcgacattgctgggccttccatccggggtgctctggtgctaggttacgagggctggctggccggctaccagatgaattttgagactgcaaaatcccgagtgacccagagcaactttgcagttggctacaagactgatgaattccagcttcacactaatgtgtaagtgtacatgggggcagcagggtgggaggggtggggttggagcatgtgtggtaaggggattgcttttcactgtttttttttttttttttttaagaaagcccagtttttaaccactgtaaagtgagtttgttggcattagatgagccacatggcctgctgctatcttttgtttcccacctacccatttcctggagtgtcttagatcctttccactctgtgaacagtatatattgccacaggtacacaaagtggctgattaattacagcagggacatggtgtcagtccagagcgtgtccattccctgcagtttttgttttagttaacaaaacagctctctttctctgtctaatgcctgaggattagcctgctgggcttgatgacatgtagacatggtagacaaatttaggagctgattatctcagttacaaactatcttctctgtacagtgaagcatgtaaaagtaactattggacagtatggtgaagggaaacagtgattataggttaggagagagccccttgagaattgaagtagattgatgatttaagttaagggaaacacatttcattcatgaatcttgttttatccataaaccttgttttatttagtttcatgaggaattaacctgtgacaggcacaagctgggtgcagagttaccatgtttatttctttccactagaggtcactaaagaagtaacttcttaaacttaaggcaaatcagtgatattaatgtgtaaactaatatttccattaataaattttttgaggaatttttatcattaatttggaatctgttacagctaaaaagtcacaggaaaactatagagatggacaatctagtggttggcagggggcggggagggtatgactacaaagcagtgactgagggagtttcggggagggaactgttctatattctgactgtcgtcatggttacattaatctgtgtacgtgtgttaaaattcgtaaaaatgtataccaagaaaatatccattttggccgggcgtcgtggctcacgcctgtaatcccagcactttgggaggccgaggcgggtggatcacgaggtcagaagttcaagaccagcctggtcaagaaggtgaaaccccatctctactaaaaatacaaaaattagctgggcgtggtggcgggtgcctgtaatcccagctacttgggaggctgaagcaggagaatcgcttgaacctgggaggtggagtttgcaatgagccgagatcacgccactgcgctctagcctgagcaacagagcaagactccgtctcaaaaaaaaaaaaaaaaaaaaaaaaagcaaagaaaatatcaattttattatatgtttaattaagaagaggtgaaacatactaaaaagctataggaaacataccacatgcatagaaatgtttttgaacgtagaattctgattggcatgggaagtgttttccttggtttgaaattgggcattggcaccaattcttcagtaccaattctaggaggaacaatggctgttagccatttcccccacatatctgagcttcagcattttaaataagcaacaagtgggtatggtttatttttggaaccagcgtgaaggcagctgacacaactcatctgggttgccctggtgcttgcaggggcccaaatgcataacagaaattctttgtgcttcatatagatgaatttgaacagttccacctgtgtatttatttatttattattattattttttggtgacagggtctcactctctcacccaggctggagttcagtggcacgatctctgcagcctccacctcccgggattaagtgatactcccacctcagccttgcaagtagctgggactacaggtgcatgccaccacacctggctaatttttgtattttttgtggaggcaggatttcgccatgttgcccaggttgttcttgaacttgtgagctcaagcgatctgcccgccttggcctcccaaagtgctgggattacaggtgtgagccactgcatctgccttctgtttatggttttgaaagctctgtacaggaaggcagtattgtgttcctggttttaggatattctgaaaagtctggccttttttaaaaacatgtaagcccaagaaacttccccatttgaatatattactaaagtcattcaaaaatcttatttttgacaggctgctgttttattgtagcatacttgggctgtctacagaagacaggattctctgtgaatcaggcagtgcctgggtctccctgtactttctagaagcataatgtctgtctcgctgaatttcatggggaaacgaaaatttacaatgtgtggctcatacgtgtaatcctagctacttgggaggctgaggcgggaggatcacttgaggccaggagtttgggaccagcctggggaacatagaaatactctgtctctaagaaattttttaaaaattagctgggcatggtggcaacatgcctgtgatcacttgagcccaggagtttgaggttacagtgagctatgattttgccactgctctccagcctgggaaacagagcaagatcccatcttggggaaaaaaaaaaaagaaaatttagaatgtattctctgatttagggagagtgtcttgtgaagactagagtttttgttcttaggtcctgaagccctttgctggattccaaagtacgtgggctctgactcacagttaaccaatgccatttccactggaaatgcccacaatgatgaggcagaactcagacactgattttatgttaaagatgtttgagagggtctaggcaggcttgaagaccatctgatgcaaggaggatggtcattcctttttaaaaaattgcagcattaaaatttttcttaatttttttaatcaaaggagtctgaacccatggttgtaaaatcaaacagtacagatgggcctatgaaaagcagtgattccagcctgcctcagcctgctcatcccagctccgcagtggcagccactttaactgtttttgttttctgtggttccctccatggagaaggttgcttctgaccaggcaccagtatgcactgtgtgtataaacaacaatctgaaagcagtaatgagagacagtctatgatctgtgccgaccccagcccgacagaggacaaagtgtagactctgagctcttcgtatgcctttttaggggtggcagtgactgcagagtttgtataggctgttcagctgggtggggcagactttcaaattctgagagcttaagcagggccccaaaagaggaagaggagaatttgaatgactgaagaagggaaagggatattcccagcaactggagtcattcagtgtgtttgtaagagaggagggagcttggccagctggggtttcattctgaatgtttttgaaagagggagacattttatgatgtagcaaaaagctccctttcaaatcctgccaggcttagatgttgcagcatgggtgaggagtatgcacaggtggacgagatgaattgtggattaagctcttttgaagtgctgctcctccaagaggctgggtcagtgccaactgtatctccccagcagtggctgcagcaggttgtgccaagggctctaacttgccttctgaggcatatgtgcagccccacctttcttgccatttctggctgtgttctcttctcattttcttctctttccataacattttttatttttacttttattttttgagccagagtctcactctgtcacccagactggagtgcagtggtgagatctcagctcactgcaacctctgcctcctgggttcagacgattctcctgcctcacccccccaggttgctgggattacaggcacctgccaccatgcccagctaatttttatgtttttagtagagacagggtttcatcatgttagccaggctggtctcaaactcctgacctcaaatgatctgcccgccttggcctcccaaagtgctgggattataggcatgagccactgcacccggacttccatgccatttttctggtagaatcgtttataaaagtaataacatcagtagcagtaaaaataaatcactcagaatctcagtgctctacttgctgcttcttttttttttttttccttatagagacaggatctcgctctgttgcccaagctatatcctgggctcaagcagtcctgctgcctcggcctcccaaaatgctaggattacaggcgtgagtcaccacgtaccccctctcccctggctttttctttttttgtttgagacaatgtcttgctctgttgcccaggctggagtgcagtggcgcgatctcggcttactgcaacctctgcctcccaggttcaagcgattctcctgcctcagcctcttgagtagctgggattacaggcgtatggcaccagcccggtcaatttttgtatttttagtagaaacagggtttcaccatgttggccaggctggtctcaaacccctgacctcaagtgatctgcccatctcggcctcccaaagtgctgggattacaggtgtgagccactgtgcctggctaggtgcctgttccatacttatcagacttcctgtaatttagtacctgttttgtgaaatttggtgaacttctgacttcccttaataccagtattggttcagtccatttctgtcatccctgtcttctgggagacttgggtggatctgtctgggctgcagctcacctccctgggaagctcagcatctgtcctgtgcttgtttgcaggaatgacgggacagagtttggcggctccatttaccagaaagtgaacaagaagttggagaccgctgtcaatcttgcctggacagcaggaaacagtaacacgcgcttcggaatagcagccaagtatcagattgaccctgacgcctgcttctcggtgggtatctgtggaatcacgcatctcacaggcaggcccatctgctctttatgttggaatccttcaggtttgctggagtgctgtgcttcagcttactcaaagtgagagatgctgctgggcgccgtgactcacgcctgtaatccctgcactttgggaggccaaggcaggcagatcacttgaggtcaggagtctgacaccagcctcgccaacacggtgaaaccctgtctactaaaagtacaaaaattagccgggcatggtggcgtgtgcctgtaatcccagctactcgagaggctgaggcaggagaattgcttgaaccggggaggcggaggttgcagtgagctgagatcgtgtcactgcactccagcctgggtgacagagtgagattctatctcaaaaaaaaaaaaaagactccgtctcaaaaaaacaaaaacaaagtgagagatgttctcactttgaaaagagtgccaaatgagtacagtgatcatactactagtacttcttatgggtaccaggcactgtgcagagccttttgtgtagattactgtgtttaatcccatttgaaataggtgctttggttttttaatcatctctgggttttttttattttttgtttttttgagacaaggcccaggttggatgcagtggtgtaattgcagctcactgcagcctcatcctcctgtgctcaagtaatcctgccacctcagcctcccaagtagctgggactataggcacaccagcatgcctggctaattaaaaaaaaatttttagtagagacaatgtctcactctgttgcctgggctggtctcaaactcctgggctcaagctgtcctcccacctcaacctcccaaatgttgggattacaaggcatgagccaccatgcctggccaatcatctctgtttgtttgtttttttttttgagacggagtctccctttgttgcccaggctggagtgcaatggcacgatctcagctcactgcgcaacctccgtcccccaggttcaagtgattctactgcctcaccctcccatgtagctgggaacacaggcacccaccaccacacctggataatttttgtgtttttagtatagacggggtttcaccatgttggtcaggctggtctcgaactcctgacctcaggtgatctgcctgcctcggcctcccaaaatgctggaattacaggcatgagccatggcccctggccaatcatctctgtttttacaaatgaggaactagaaacttaggtgagtaacttgctcaaaggtacacagcaggaaagtgctgggagctggatttgaaccagactggcttactgttaagcctcttccattaataccagttcctgttctatcatgcggactgttaaaaggggcactctgaaatctagggttctaattgataattccccccgccccgcctcacttttcattctccttttcagctcctgcattgcatattaagaaatcaatagtcagttggcatcttgcagagtctctggcattgctcacaggccctcgaactactacacagtttttgcagtaaatcctattgggctcatttctgttgtcacagggcactggcggctgtatctctttggggtgaaatgagggaatctcatgttgcagaatggtgtctgtactggtttgtgtaatttatggacagccctttttaagtctcctaaactagaaccgaatttggctcccttaacagcaagcacttaaaaacaagagaaaaggagcctcattatttatatgagcaaaaggacactggcccctaagaggccttccttctctctgctttgttcttatgaggggtgtcagatctcagcacaccctttgaacagaaaggtatgcacctaaaattgatgtattttgtattgaatttaatgaatctcatgaacaaggtggtcatgaaaaattttgattctaaagtccaaggttggttgactaaaaagctctaattttggagatggaagtgcaaagtattatacttaatgttttctctgttttgtcatttccttgattaggctaaagtgaacaactccagcctgataggtttaggatacactcagactctaaagccaggtatgtgttgcttgtgtgtgaaatcggttctttatcttaaaaaaattgtggtgctggtttgctgatttatgtcattgcttataaaatgtttatataatacagtgggtatatataaatggatatatgtaaagtataattaaatgtttataaaggagtatggggtcattataaaacatttggagaatatgagatgtagcaagcaggaggaaaaaggctgaggctaacacatattctttgctattttcttccatccttttttccagtgtggacataatgcttgatacttatttctggcagattctcaaaactaacttataaatcagccccactgtaaaaagacaaagaaataggaaaagtggtttgcaggtttcctctgcacagttggctaggccagtccacggcgtattatagttctagtgtataaccacttttgaaccctggaaatctaagactaccagctactccctgaatcaggttattccagggaatgtcagtttgttgtgtgcatctgtggatgtacatgcacactacacatgtgtgtacactatgaacatgaacatgtaagaccttaggttggattcaggattgaggtttcatttaaagggatgattgccaaagaagcttactgcatgctaccagtgctatagactaattgtaccaggggaacagtgagaggaaaaaggaaagtggggttccagaagtagatttgggtaggctctctgggcggtgggataattatagttgttttataagcccactgtagtatgcctgttggtcagatagtgctaagtaacaaggattgaagggccatgtagtttggaccctgctgataatacctggaacaggttctgaatttggtgttaatctttcttgtcatttctttcctccattcctcctcctttcctctccctcatttttctccctgcaggtattaaactgacactgtcagctcttctggatggcaagaacgtcaatgctggtggccacaagcttggtctaggactggaatttcaagcataaatgaatactgtacaattgtttaattttaaactattttgcagcatagctaccttcagaatttagtgtatcttttaatgttgtatgtctgggatgcaagtattgctaaatatgttagccctccaggttaaagttgattcagctttaagatgttacccttccagaggtacagaagaaacctatttccaaaaaaggtcctttcagtggtagactcggggagaacttggtggcccctttgagatgccaggtttcttttttatctagaaatggctgcaagtggaagcggataatatgtaggcactttgtaaattcatattgagtaaatgaatgaaattgtgatttcctgagaatcgaaccttggttccctaaccctaattgatgagaggctcgctgcttgatggtgtgtacaaactcacctgaatgggacttttttagacagatcttcatgacctgttcccaccccagttcatcatcatctcttttacaccaaaaggtctgcagggtgtggtaactgtttcttttgtgccattttggggtggagaaggtggatgtgatgaagccaataattcaggacttattccttcttgtgttgtgttttttttttgcccttgcaccagagtatgaaatagcttccaggagctccagctataagcttggaagtgtctgtgtgattgtaatcacatggtgacaacactcagaatctaaattggacttctgttgtattctcaccactcaatttgttttttagcagtttaatgggtacattttagagtcttccattttgttggaattagatcctccccttcaaatgctgtaattaacaacacttaaaaaacttgaataaaatattgaaacctcatccttcttctgttgtctttattaataaaatataaataaacagggcatttgtttagatttattttgtcttcatgctctgtgtattatatattattcgttttcactcactgtacaacagattaccatatgtttagcagcttaaaacaacactcatttatttcacagttctgcaggtcaaagcgaggcaggtgtgcatgcctacctggactgtgcttagcttctcacaatgctggaattagggtgtcgaccaggctgtcttctcattttatctgggggcttggcgtcctcttccaggctttcagggttgtggtggaattcagttattttcagttgtaggacagaggtccctatttctttgttggctgagccactctcagtgctcagaggatgccagcattccttgccatggggtcccctccatcgccaaagccagaaacagaaaaactccctcatgtgaaatccctctcacacttccagtctcctccaggtagagccccaacccttttaaggactcacctgattaggttaggcccaatgagggtaatctcccttcaagttaactgccaggtaaagtaacctaatcactggtaatatcctttcatgtttgtaggtccctccatatgggtcatgggaaggggtgattttggaattctcccatatatttatatgtttttaataacttgatggtggatttttttttttttgaggcggagtttcattcttgttgcccaggctggaatgcaatggcgcacaatgtctgctcactgcaagctccgcctcctgggttcaagcaattctcctgcctcagcctccccgcctcctgggttcaagcaattctcctgcctcagcctcccgagtagctaggattacaaacatttgccaccacacccggctaattttgtatttttagtagagatggggtttctccatgttggtcaggctggtctcaaactcctgacctcaggtgatctgctcaccttggcctccaaaagtgctgggattacaggcgtgagccaccacatccagcctattgtggaaacacaaatagtaataaactctatgcatgatccagcttcaacaaatatgaacatttttttccattcatgatttttcagcagaattccttttttttctatgtttgaaagtgacattcaaaacaggaaccatctattttagcattttatgcaactgatcacccaaaaactgtgggcctcagtatttgtcatactgtcttcagggacttgcagctatttctaagtgaatgttcatagaatttatccagagattatggcacatagtggttgctgggtacatctagtcagatgtcaggtacagtattaagatattttacttttagagacagtcttactctgtcacccagactgaagtgcactgtcatcatcatagctcactgcagccttgaactcctgggctcctgtgatcctcccatctcagcctcccgagtacttgggattacaggcataagcctggccctaaaatatttaaaaatgtataaagggttctcttgagtatgagggaatatttccctcactagttacttattgtctgcttgttgcatgcagcatgttggaatatcattgtgcaaaatgctttgagttcataatatctcaccagttaagagaattgagacaatctggtatgaggacacaaatggacaaagtggacaatgagtcagggaagaggactgcagtgtgtttattatagattaactttaaagtcaacaagcagaaactaagattgagaagctcatttgttgaactgagtggttttacagaaaacttaagtaccgctcagagaagggaagctcctgggggactgggaggactttgcaccttggctaaagtggagagtttgcaataaggacaccattcagtctaatacgggcttctgggggatttcgggaaatgtgcagatgaatgacttcttagttttcttaacacagagtttgtgtgtttctgagctgtcaccagggtgagataaaagcttaggggaaaccagattcaggagtagaacacaggccctttagagagacagctcagctgtgtctctgggggataacagcaatcttcgcagggaatcatagagaccagaatggtgaagctgtgggcacaataaatgtcttgcttaacgtcacattgattttcctgaaattgatcaaatggaacttttatgaattgaagcctgtatctgtttattaaggagacatttacagaacgtacacacagagcaaagtatggcgccagggccctaggtgaacttcttggaagtttgtaagtttgcatttttatacactggggatttcaagtaacaaaatttaaaaagagaagcttattttaggaaatctgaaagttattttcaatggcagcccctcacctctacttcctagctaccttcctttcttttcctccataattttttttttttttttgagacggagtctgtggcccaggctagagtgcagtggcatctcggctccctgcagcctccacctcccgggttacagcgattctcctacctcagcctcccgagtagctgcgattacaggcacgcgccaccacgcctggctaatttttgtatttttagtagagtcggggtttctccatgttggccaggctggtctccaactccggacctcaggtgatctgccctcctcggcctcccaaagtgctgggagccactgcactagggccggtccataatatctttatcatcttgtatagtgtgtattttacaccatattcgccctcacaagaaaataaactgccaaggcgggcgggggggggggggttctttttgttcactgctgtatcttaaatagggagaggtgctaaatctttgctgaaaaaaaataaatgactgtcgggaaagatttttaaaaattacttataatcccatcaccgaaataggactacttaacatttgtgtttctttcgcctttgagagaggaagagcagttacttcgctttcgtgatcagtctgttctacagctggatcttcctttttaaaatggctaaaaacgctatttttggctgtatagtacccaatcatgcaggcggcagggaggggctcgctttggccctcttcagcacgtcacaccctacctttaatccgcagccaactgtgtggcggtccccactttcgcctagcggcaactccctcctccctgcaatccttccttcttattccggtttccagagcacgtctccaggcttcgacgtcaccacgctgggacgtatgtgccgagggccgcggcgtctgacctcatggcgtagagcctagcaacagcgcaggctcccagccgagtccgttatggccgctgccgtcccgaagaggatgagggggccagcacaagcgaaactgctgcccgggtcggccatccaagcccttgtggggttggcgcggccgctggtcttggcgctcctgcttgtgtccgccgctctatccagtggtaaaggggggcggcagtgtgggcttaggaaggctaggagggctcgggcgcagggcaggagacaggccgggccagggaaagggcgcttccaagtgtcaggagcagacggcggtgtctggttgggtcagggtctccgcgggcctgaggacggagggtatggtgtctgaaggggtccaaggtggtagggtctccaaggggcctgagaagcggggtccctgagagatgcaggaacccagggagcaggcagcagggtgtgtagatgggcggggagggaggagtggtgttagcgcctagagatcgttgaagaatgggctgccgcaaggaatggcggtggtggggtctccaaaatttcttggatcggaaagttaggagactctggaagagagggtggcgacaggggctgaggaggtggccggggctgggggtgtggtgtctggaaagggtcctgagtttgggggactcaggaatcttgcaggaccaaggaaaggtgggggttttccagaatgggagaggtcagtggtaaagaccgaggcgggcaggggcagtaatccagtgactggactgaaccaatggaatatttccgagagggaaagtgaaagggaaagagctgtcttagggtactggtgcatatttgaagactgggaggttctggtgtttgataaagattcagagtactggggcgttgggcccctgaaggcttgggaggcagagaggagtttggagacaagggagatcatgattcctcttccctgtgttccgagttaaccaggataaccctgcctcgttttaatgcatctgtaggatttgattgataaaatatttcatttcttgcaaatgttgcatggtgaaatcaagagattgaaggcttttattgagaaattaggaaatctgtaaaccagtgcctgatacttggtgggaaaaatccactattaagaacttgtaaggattaaacggtattttgtttagtagtcccatttttctttcaggccaagacacagtcctgcgtttctccctaaatttgaattttcagctgcaaaacagtgtgacctggtatagtgttttctttcttgccaacagggcctgtccagccctacattcctctgcgacagtactgtgggtacatacttatgtttcctcagcaacatttcagtgttgctaactggacgccctcccagaagtctttgcagtccctgaggaaggactgctgtccatttcctaaggcccttttatcattagtgaaatgtaatgaggatttccctggttgatgcagatattcccgttcctaaagtacttaagtagcttaattgttttggccatttaatcatctaagaaaaataaaacacaaacatttatatttcctgctggaatgcttaagggatatatatctggcaactgtagtttcagaaacagcttttttcccctaagagatggttgaaaattgggcaagaagtgaggcagaatgtggactgttaagtgtcctttagtctctgcttttatttgttagagccctataaatatttttctaactatactgagacattttagagaatctttatcttttaaattaagtctttacatacaccagtttaaaatgtcataaattcagattattctgtcctgaaaagaagctaaatgaaaacgaacatacatgtctttaataggcgagcagctccactgcactacagtgtagcttgggatataagtattttttgtaagcataccttataatttcaaagtagtcactcctgtaataagaaaattagtctagaatgtgttgagttccaaatttcaagtgagtttacaaaggtagaaggttaccacattagatttatttaaatttgttccatattaggttttaaaaactgtcaatgcttggttatatgctcgtcagtctgtaagaatttttgttttatgtttttgttttgatcaagtctaaaaaattaacataagcagtttggatcactgggtgactaattcttggtcatgccatttcaaaaatgcctggttctctacatttgccattatattgtccccaaatgatcacctaaacttaatgtataatgcatttcatttttaaggcattgtttctcaaaccagtgtgtgaatgagttctcggggtcctctgcattcttaagtttaagaaatgctgatatagttttattttagggcagtttttaaaaagggaccagtagaaggggagaattaaatttataaagttttgttttttgttttttttttgagtctgtcgcgaggctggagtgcagtggcgtgatctcggctcattgcaacctccgcctcccggtttcaagtgattcttctgcctcagcctcccgagtatgctgggactacaggcgcgcaccacacctggctagtttttgtatttttagtagagacggggtttcaccgtgttatccaggatggtctcaatctcctgacctcgtgatccgcccgccttggcctcccaaagtgctgggattacaggcctgagccactgtgcccagccttttttgtttgtttgtttgagacagggttttgctctgtcgcccaggctggagtgcagtagcacaaacttggcccattgcaacttccgcctcctgggctcaagcagtcctcccacttcagccccctgaatagctgggaccacaggtgcctgccaccgtgctcagctgatttttgtatttttgtagagatggggttttgccatgttggccaggctggtcttgaattcctgtgcttaagcgatccacttgccctggcctcccaaagtgctagggttacaggcgtgagccaccgtgtccggcctaagctttatttttaaaatgttaagcttcaagtagagaggtaatatcaattaggaaagggaagatttagaagtcttatttatatgctcatagaaggtcaacagttaaatccgtaaagtcagagttgtacctttgttctgaatactcttcatatctgacttaatcaacttctctgatttgaaggagtttgagtaagttgatagcctttgtattacatgtttcaggtcaattatttgttttttcttgtgctgtatttgtgtattacttccaagattttactgcttgactaagacattctgctcctacttggtgctaggtattggagttaaacaatgaatagggtgatactgggggtatccttagaagaatgagtggcgttttgctgagaaccatggcatgggctcttgagggagtgcagtaggtgcatagatgctatgtgggatgtggtgtgggatttgtggtgagagttgaatcgagagcatattcaataaatatttattgagtgcctgctatctattaagtaggtaatggggatagagctgttagggagattagtaagataatgagagtgaggtaatgggggccagatcatgtaggatcttgaaggctattataaaaattttcacttttgtgagaaatggatggccctagagggtcttaagtagaggagtaacatttgatttaagttttgacagaatgactctggctgctgtgttgagtatagacagtagaagttagggtggaagcaggcagattaattaggaggctattgtaataatccatgtgagataatggttacttggatgaggcaggagcagtggagggtgaaaagccctcaaatgctgcatatgtcagaataacagattggatgtgggatgttaaaaaaaatgacaactccaaggtttttagttttagtaactacaaagatgtagttgccattaattgagatggagactaagtagaacaagtttttttgttttttgagtggggcataggaatttatttaaacttattttgagataattatagattcacttggcagttgtaagaaataatatagagatcctgcatatcccctacccagttttcctaatagtaacgtctttcaaaacaatagtgcaatatcacgaccaggatattaacattggtacagtcaaaatacggggcattaccatcaccacaaggatatctcatattgcccttataaagccaccccacttccctcctacctcacccctcctgaactcctggtaaccacaaattatccatttgtataagttggtaattttgagaatcttacataaatggaataatacagtatgtaacttttgggattgactttttttcacttagcataattctctgaagattcacctaggttgttacatgtgtcaatagtttgttcctttttaaattttaacttttattttttcgagagtaagtcttgcactccaggctggagtgcaatggcacgatctcggctcactgcaacctccgcctcccaggttcaagcagttctcctgtctcagcctccagagtagctgggattgtaggtgcacaccaccacacccagctaatttttgtatttttggtagagatggggtttcaccattttggccaggctggtctcgaactcctgaccttgtgatccacctgccttggcctcccaaagtgcccagattacaggtgtgagccaccagtcctggttgtttgttcctttaaattgctgagtaatattctatggtataggtagactacactttatttatctgttgaaggatgcctgattgtttccagtttttggctattatgaataaagctgctatgaatgtgtttgtgcagcactccagcctaagtgacaaagcgagaccctgtctcaaaaagaaaaaaataaaatgagctttctatggacatcatgtagttgagtctgccagtctctgttttttaattgatgtatttaggtcatttacatttactgcactatggatatgttagagctgaagtctgccatttttattttttgtctttagcctgggatatatgaggtaaaaagaaaaacctaaggaagtcaccaccatgttgtttcacatatcctgaggtctctaactgttctacccagttctttccacctttcagagtgttcttgtgttattttatacataatgttcagagcttttagttgtttttagtgggagaaacagggaagagtgtgtttgtcttcctgaaagccagccagaattcattttgaacatattaatgtgaatgtcagacatctaagaggagatgtcaagtaggtggttggatttatgagtctagaattctggtcgttcttggaagttcttttaatttttctcagaaaagttaggaagtgatgtcatcagttgaaaatgaggataacagagaagacatttgaagtttgtggttagaggaaaatgtgattggtgtcctaagagagtagaagggtaaatggactaggaaaatatgattgccaacaattttaattgccaacagctttaaacatacacctgaatctttggcattgaatttaaaatgaaatgaaaacagtggcatggttgtatattttttctagccatgttcagctgctgggtgcagatgtgagtagtcagagagcttgatttattaataactagggatgagtgtagtctcaccaagtgaatgggtcaaagtggacaagggggaagggaattgaagatggatgtaagagagtgattataagcaattataatagctgacacagaattgaatctgaataaagagagaagagagtgtattgggcaagttttgatggtgaccgtaagggaatgaaaaggattagagggttgtaggtgtttatggattgagaataccagggaatgaactggaaggataggaggtcttgccagcaagtagaatgcatgaaattgagattatggaagaattgtgataataaataatgactctgggagtgagtggctgaggtaaagaggagggctagctcatgagaagagaggaggtcaaagattttgaaatcaaggcaggagtacttgtcttagatggagtgaactctagagccaggagctaaagatcattaagaattagggggcatgactttggagttggatgaaagtaagttagtgcattatagcttaagataagagaatcaaagctagaggcatttagggagaagaacgggagaatggtctgaaaagggcaatgaggaggagaactgtgcctccttgagattcagtggttcaaggatgtgggagaaaaaacagctattacttaaacaggctgaaaggaaaatgtgtccttaagggagagtcaggtttcagtaataacaagaaagcaaagggtgaaagaagggatttgctgatgactgtgaattctatactgcgtggtggaaatttctttataattattcccaccctatcagcttgtgtcctttaaaggtacttacccatggaaaaattgttcttttaaaagttaagtttagttagttggctcccacttatttcaattttaaattttattttaaaacatgttttttgtactttggcaggaaaattaaatgtatcagaaaataataatttttaaattcttgaattataactaagttgaagtgataaatgcaaaaattattttcagaaattcctgttagtagttttctgagtaatgtactgagttgtaggtcctgtttatttctcttttcttccagtaaaaaatttcaagg

SEQ ID NO: 221 - DNA, 1806 bp, Homo sapiens
gccgctcgctcggctccgctccctggctcggctccctgcctccgcgtcgcagcccccgccgtagccgcctccgagcccgccgccacatcctctgagaagatggctgtgccacccacgtatgccgatcttggcaaatctgccagggatgtcttcaccaagggctatggatttggcttaataaagcttgatttgaaaacaaaatctgagaatggattggaatttacaagctcaggctcagccaacactgagaccaccaaagtgacgggcagtctggaaaccaagtacagatggactgagtacggcctgacgtttacagagaaatggaataccgacaatacactaggcaccgagattactgtggaagatcagcttgcacgtggactgaagctgaccttcgattcatccttctcacctaacactgggaaaaaaaatgctaaaatcaagacagggtacaagcgggagcacattaacctgggctgcgacatggatttcgacattgctgggccttccatccggggtgctctggtgctaggttacgagggctggctggccggctaccagatgaattttgagactgcaaaatcccgagtgacccagagcaactttgcagttggctacaagactgatgaattccagcttcacactaatgtgaatgacgggacagagtttggcggctccatttaccagaaagtgaacaagaagttggagaccgctgtcaatcttgcctggacagcaggaaacagtaacacgcgcttcggaatagcagccaagtatcagattgaccctgacgcctgcttctcggctaaagtgaacaactccagcctgataggtttaggatacactcagactctaaagccaggtattaaactgacactgtcagctcttctggatggcaagaacgtcaatgctggtggccacaagcttggtctaggactggaatttcaagcataaatgaatactgtacaattgtttaattttaaactattttgcagcatagctaccttcagaatttagtgtatcttttaatgttgtatgtctgggatgcaagtattgctaaatatgttagccctccaggttaaagttgattcagctttaagatgttacccttccagaggtacagaagaaacctatttccaaaaaaggtcctttcagtggtagactcggggagaacttggtggcccctttgagatgccaggtttcttttttatctagaaatggctgcaagtggaagcggataatatgtaggcactttgtaaattcatattgagtaaatgaatgaaattgtgatttcctgagaatcgaaccttggttccctaaccctaattgatgagaggctcgctgcttgatggtgtgtacaaactcacctgaatgggacttttttagacagatcttcatgacctgttcccaccccagttcatcatcatctcttttacaccaaaaggtctgcagggtgtggtaactgtttcttttgtgccattttggggtggagaaggtggatgtgatgaagccaataattcaggacttattccttcttgtgttgtgtttttttttggcccttgcaccagagtatgaaatagcttccaggagctccagctataagcttggaagtgtctgtgtgattgtaatcacatggtgacaacactcagaatctaaattggacttctgttgtattctcaccactcaatttgttttttagcagtttaatgggtacattttagagtcttccattttgttggaattagatcctccccttcaaatgctgtaattaacaacacttaaaaaacttgaataaaatattgaaacctc

SEQ ID NO: 222 - DNA, 852 bp, Homo sapiens
atggctgtgccacccacgtatgccgatcttggcaaatctgccagggatgtcttcaccaagggctatggatttggcttaataaagcttgatttgaaaacaaaatctgagaatggattggaatttacaagctcaggctcagccaacactgagaccaccaaagtgacgggcagtctggaaaccaagtacagatggactgagtacggcctgacgtttacagagaaatggaataccgacaatacactaggcaccgagattactgtggaagatcagcttgcacgtggactgaagctgaccttcgattcatccttctcacctaacactgggaaaaaaaatgctaaaatcaagacagggtacaagcgggagcacattaacctgggctgcgacatggatttcgacattgctgggccttccatccggggtgctctggtgctaggttacgagggctggctggccggctaccagatgaattttgagactgcaaaatcccgagtgacccagagcaactttgcagttggctacaagactgatgaattccagcttcacactaatgtgaatgacgggacagagtttggcggctccatttaccagaaagtgaacaagaagttggagaccgctgtcaatcttgcctggacagcaggaaacagtaacacgcgcttcggaatagcagccaagtatcagattgaccctgacgcctgcttctcggctaaagtgaacaactccagcctgataggtttaggatacactcagactctaaagccaggtattaaactgacactgtcagctcttctggatggcaagaacgtcaatgctggtggccacaagcttggtctaggactggaatttcaagcataa

SEQ ID NO: 223 - DNA, 79467 bp, Mus musculus
  misc_feature (4099)..(4369): "n" at positions 4099 to 4369 can be any base
  misc_feature (5502)..(5521): "n" at positions 5502 to 5521 can be any base
  misc_feature (10089)..(10620): "n" at positions 10089 to 10620 can be any base
  misc_feature (13273)..(13370): "n" at positions 13273 to 13370 can be any base
  misc_feature (20762)..(20781): "n" at positions 20762 to 20781 can be any base
  misc_feature (30751)..(30916): "n" at positions 30751 to 30916 can be any base
  misc_feature (46579)..(46772): "n" at positoins 46759 to 46772 can be any base
  misc_feature (77382)..(77401): "n" at positions 77372 to 77401 can be any base
caaactccaaggaaggtaaattctaaatcgagtctgccaacggagagaagaaagtgtgcagaagagccaagtgggacttccagagctgaaaggcacactaatccagtaagtgctggaaatgacgtcccagtgggggcttagccatggcgctgagctggcacaggcaagagccggggatgtgctattccaactgagactgcaggctgtggactgaaagaatgagaagagatgtcgggagaggaagtaagggagcggagagcaagagcatatgcacagagggagggagggagggagggaggcagaggggtgctgaaaccattacagatgtgtaacccaatctgcaccaccaggaaaatcccagcaaactccaaggaaggtaaacttcaagagaccagcaacaaactgacctcacaaggagatatatcaaaagcagaaggtgggggtattaacccttgcaagggaaccccagtaacgttaacatctgaccctagaagcagcaactgaggcttgaagacagtatgtccaaagggcactaagaaaaaacttgcaacagacccctgtgctcaacaaagcttctttctaactcttagacgaattaaaagctttggcacagaaacaaaagccaagaatacgctgctagcacaaagaaccttcttgcgaggaatacaaggcaaaggcgggaatgctgggacagtaacctgcacctacaggaagcagcacgtcaggaggcaggcacgtgattttacaaggcaacatgcatgcatgttttcttctcatgactcacttaaaaaacaatcatataaaacaatgtgtgtatactgtagtgctttgccgatagcttacagaaacgcaacccaggtgtaagatgtttgccaataacaacaaatagtgtcttaagggactgcagaaggcaaaggaacaattcccacaatgcaccatgaggtttgtctgtatcgctttctgtaatgctgtagaacatcacaccactgggcaatgggagaaccatatagaaataatgcttctgtgagtcactgaaatggtcgcagggtaaactaaaacccagcatgaagtcacgtgtagctggcaaacacagagcagactctaagggatgctgcaaaccagggaagtaccttctcaccaaacacatcctgtaatgcaaagaaagcaataaagagactgagtgaaaggaacacggagaatgtagagagaacacgccaagttcaacttcattacctgaaactgaaatgtgaacagattaacattccagtcacggggcagcagtagtcaagccgaagagtcaaacattgtacaacttcatgctgtcttctggagataagctgtaggtggagaggtacacactcactaccaggacgggaatcatccatcatgcacaaagaaactccaggaaagccagagtggctgtgctgctgttggatgaaagaaaccaaaagtaaaaaataaaagtcaaagactgctgaattggatgctcagctccctccaagcctcgtgtattgaagacatggtccctagagaggggttggagccatggagagagggggaaaacctttgggcagtgagactacctggtaggaacccccatttctggagacaagcccttcatgaggttgatccccaccccaaacctcccttccttttgcttctctgctgagatgaggttgttgtgggctgtcccatggtcccactgtgataggctgtactgccataggtcctaaagcaatgggggccactcaataatggactgaacaggccaaaaaaatgtaaattaaaaaaaccttatttcttcatatgttaatcatctttgtgttttgttacagtagccgaaagctaactgatacagattaagagggctgcttcaaggtaactaaagaaccagtgtctgagagacagagagagagttctaagtgtaggtgtgcctaacaacacagttcccaaagagacatagcagagccagcaggtacttggtgaaagccttcagagtcagggcaggttgactctgtcagggggtgagcgtgactcagagtggcttcagtgacgaagtcccttgtggccacttcaggcaaaagatgaggaaattgaagaacactaggtatcaagggaagcaatttggtctttattctgatttccaggacatatgccctgggagaaagttattaataactgactgattaattgattgattgtggtattcgttttattttgttgttttagggctgtgtcaatttctcatcatgagacaaaataccagagacagccaccttaaaaggatgaaagcttatgttaagttattgcttccacaggctcttagctccactgcctttggacctatggcagagcagaacgttctggcagcagagcacactgtgggcaaagctggtgaccttaggcaacagagatggagtgtctggtctcagtatgcactccgagagcagtgcccatcccatgaggtcctgactcttcacaccccagcacaggacaatgctccatcagccagaaaacaggtcgtttgccatggccttcaagacttgggttttttttggggggtcaggggtgggggcacccaaacctttaggaaatggatgttgctctggttaaatcaaatcatagaaggcatcttcacttgtccagggacgagggagagattaaacaggaaccccaattctgtggtcctccaagataccccaaggtctgagagggagtggctgatgttgctgtaactaactcaacggcaactgtcaggcttcacttgactgtttttttgtttgtttgttgttgttgttgtttgtctgttttgttttgtttttgcttttgtttgtttgtttttaagcactttaaaagtaacctgactgggcaccaatcaatcagtaggcagcacatcaagccagggctttagcaccaatggctaaccaatcaactcaaaccagccaggtgtggtgcatgcctgtcaccctagaactgggaatattataagaggacctggagttcaaggccagcctgggctacctgagaccctttttaaaaaatgatgctcctgaattctggcctgttaattccactctcccaaaccggctctggaggaaggcccagtttcccagccttcccagtgcctcacagtcctgggcctcctccctgtgttgtggagtgaagtagatagatccagtcagaagccccaggtgaggtaacaggagggagttgcaaagtaaccattgctgtggcccacactgcagatgcagtgaggagatgtgtatttagctactgatgttttacatggtttacgtaagcaagcaagatgtacatgggtctggggcttgactgtacaaagaagccctccctagcctggtgcaccgtacctgcccacagtgcagtgtgtacacagccaaaggaggctccaggttgcaggactgagagtcgtgcccctagcaacacagaaccctgcttttgcactaaaagcccatcagatcttgttggggttttctgtgcccttgtgttttcacaccaggttagaatcaacaattgcctggctcttggaaactttgagcgctgggtggataaccaaatgtgccccagaaggaaggatttagcacccaaagacacctattggattaagcttctggggtgcatttgccccaataatccacagaagcaacagtaatctaaaaatagtcttgttttctgtcctaagctccttttaactttgttagtcatcgccaaaccttaaaataaaacccgtgtaacgtctctcctggtagcagctataaacaaacctcctctagaggaggccgaaggaagaggaaagaggcggtagggacacgcagggagcgcggccgcgggaccaggcttgagcccgaggtggccgcagggcctggcggacagctcagagctggccgagctcctgcgccgctgcctccggaactccctgcgcctggcgtgcggccaccgtggtcccggcaacggcattaaacagagggaaacaggcccgggattccgtcacccgcgggggataaggagggcattgagacagacaggaaagggcttttctggatggggtgaaaagttatttattggagagggaggggggagnnnnnnnnnnnnnnnnnnnnnnnnnnnnnnnnnnnnnnnnnnnnnnnnnnnnnnnnnnnnnnnnnnnnnnnnnnnnnnnnnnnnnnnnnnnnnnnnnnnnnnnnnnnnnnnnnnnnnnnnnnnnnnnnnnnnnnnnnnnnnnnnnnnnnnnnnnnnnnnnnnnnnnnnnnnnnnnnnnnnnnnnnnnnnnnnnnnnnnnnnnnnnnnnnnnnnnnnnnnnnnnnnnnnnnnnnnnnnnnnnnnnnnnnnnnnnnnnnnnnnnnnnnnnnnncctcgccgctgattcctccgcccagccccgccccgccccgcctggtccctgacaggggaagggcggggacggaaactcttcaggcaaaatcttggcgtgctggtctggcgacactaggactcactgaagaatgaatttgggggaggggggttggaggatggttcttgggtaatggggtcttggcaccccctagcggcaacctctttcaaggagagcagggaggcttccgcgcatccctgcaggttttgaaggtaccactttggcagccttgcccgacatcccagcatcttcactgagcattcagctacttaatagatcatgctccacacaccggtgtaggcacctccagcctagctatactctagaccacctgcgtgagtggctccatcctctcaaagccagaggtagagaggtgcgcgccatgcctagctctccatgtgagtagcaggccagtaggtagtgcgcctgagacatgttgggcactgcctgtggctatgcagcatccaccactgcgcttctctgccgtggtagaaaacaggatggcttttagttctgtggcgttgaggcaactagaaagagccgctagatgctgctggaagagtggatgggttttagccaagttttcatattgtttaacatcgagcccagttggccagctccattgctggttggatcagattctctaagtcttggggtgtgaagtactttggagcacctactggctcactacacgccccgcgcgccccacagtctcgccgccccacagcagacacgctttttttttttgcttttgagtttattttaaagcatatgaggtgtaggccaatagatttatgatttctatacaccagacgttctaactgcccaaccctccaatccgttccgtccaaagccaacaagaaaatatggtcgggttttggcagcagagttgcacccctaggagatgcggggagatttgaaagagaaaaagtgtgaagcgaggcgggacagaatcctcagaagttcccccagcaccagcctcctcctatgctagaaacctcacgtacgcgcctacaaagcaccctatggtccctgcactggtcgtccgcacccggggcaaagacccagaggaggagctgcgcaggtgggcgcgnnnnnnnnnnnnnnnnnnnnctggcccttcgtgcccgctccccgcgccccgcacccatctcgagtcctcctccctggctaagctgccagggccggtctgcgcgtccagggaggggcgcgggcgtccggccggacagcgtggcacacactgtgaagggtgtccccctggtgtttccccggcgcagcccagatttctagcgcgctttcttgccaataggtgtctcctcttctctagcgctgagtactcaaacttggtggggtcttggagataccacatggggaaacttgattcacgggggcgttgagatgtgaggatggggcgcagtgggggcgggagcgctagaagcgaaaacaaacaaccaaacaaaaacaccctgggatgaagtgaggcatctttggagagccgagttggtcctgcctttacctcaggaaggcaagcaagtccatgaccagaagtataagagtcctgcatcctcccaagtgagtctagccttagctgcttctcactaaaagtaagagcttggcaaagtggccccaagtggtccagacttctaaatgcctctcaaactcgtggccaaatgttgtatccagacaagagttctgccttagaaaatgccttgagaaagatcgaagacggactgccaggtttgaggttgcttcttccaaaagaatatgcgctgcaatctgccctaacctgtcagggtcacaacaatgacatgacccagaccttctgtcagagccctgcaggtcccctcaaaagagttagcaaaataacttctaaaacgtttaggctcctgcaggtgtctttgaaacaccctttaaagagtgactagcttttcagcagggataacttgacctatgtcgaatggaccccaggagccatagggctcgtaattcctttttggcaccaaagaagttacttaaaattactgaaggccagctggacccctgctgggctggggcactcctatttacaagggcggccatcctgtagacaagcacttggaaggaaaccttagcttcctgtgagagtctgatgagtgggtcagcaggcagaggcagccgttcccagagtcagccctggacacctggctcatctttagacttgagccatcggctcagcacaaatggatccagcttttcagagcccaggtgtcctgggtagagagtcttgtgtgaactttgaagcggagcagcagagattgttcctttcatgtcgctgacctcaattctaaaaggtctaaatgttgctaagtggactcccgaatgagctcttgcagcaaggaaagctacagtgtttttgttgtggtctgggtcgtgaatttcttgacatttatttccacacacatctgtcagtcacttttcttctccatcttcttctacttggaggccttaaagcttacgttctttacttgtagcgttactgttccattactcaagaaaccttctaagctgaggttgatggctcaccctcgtaatcctaggcgtaatctcagcacctgagaaactaaggcaggaggattgccatgagtttgaatccagcctgggcaacaaagcaagaaccaggcctgccttgggctacaatgtaagaccccaagtcccaaaacaaaacttttttgtctttcctttttttctttcttccttccttcctttcttttctttcttccttccttcctttcttttctttctttcttttcttttctttcttccttccctccttccttcctttctttcttcttttcttttccttttcttctcttttctttctttcttttcttttcttttcttttcttgtttttttgtttttttgtttgtttgtttttttgtacaaaagggaaaactattgggcagagggtgtaatcatttctggtgtaacttacctagaaaaggaagtttgacagtgtccccaatgaagcagtgagctggaggcaataatgaccgaatgatactggtcatattttacagagtgtgtgtggatgtaactgagctaactagaaactgtgacccagtcttgagacagccagacccaggcaggggaaaagaactgtatgccgcaggtcagtatctgccattgctgtgggccgtgggaaagcaccttgaggaggccttgatcgggacaccagccttctctgaggccttcttccagcttgatgggcatttggatggaagctcatgcggcctggccatttttgaaggccttgtgctgctcagctctgaagaactcagagaaacacaggcctgtaggtagtcacagcgtcagagttgcctcacacaatgcgccacaggctctccggagctgaacaaagctttccctgttctccagctgtatagcttcatggcactgtttcttaatccagattagaaaatgctgcagccatgcaccctgcttcatcacacccagcacccaccggggctggcccattaacatcttgcacagttaggaggaaatggtccaagctaaacacttctatcaaaactggagtgtctgctgaactggcagaccaagcttcatactatatagaggactggcaagggggctggcagaggcacagggtagcatttcataagtagttgtgttgactgactcctgtgttagagagtagacaaggagggaggcaggccagcctctgagagaaaggccttgtgacttctttcctattgtcccaacatctgggggcatgtggccaggggaagccaggtgctttgtaactttagcataaagctttcttcaaaaagtagacaagaagggctgttgtgtgtggaactgtgggaaaggtggataaagagagatcgaggtctcacggcagaaaacagaacttccatttccccgaaggtcagcaaaaaagaaaagtaaaacaaaacaacgctccaactcgcatctcaaagtgagaactattattagaaacgaaatcaggccagactgaactatagtttatcactggagaaaagcagccattgaaacagggtcctgggagaagtggtagcccacgtgatgctcaagttagcctccggaaaaagccatcccccagagtccagagctgcagggcaggaggacactggggacacttgcatctggtggcagatactgacactaatctccctcctcctttccttcctgcctccttccagggttgggttctgatactggtctcccctgccctggccaccattttcctgatattccagatgttggtttatgtggtgccaagacaccaggaaagttagaacaaaaagctgggagaaacaggaaaagatggttggggctctgcaggcccagccttttccttctgattgctgtgtgcatggtaccctgtctgaatgggtcacacccagcacctactcagcctttgggagctttgaaatgaccccctactgaagcaggagtgtgtggtggttttttttcggagctgaaagattaatgaggtcgttagtgcacgaaaacaagatttgctttgaggtaggtgcccacagagagaggttggccaccatgggcagacttgaatgcttcggaagcaactgtgctctggggtttgacctgcatagaggagaaggcgaccctcaggaaactccaccctcattctcctgaccctttcaggtaattttagtaaaagcagggctagaaaatgaccccaccccccagcgttgattgcttcaagttgcagcgctctgaggtgggctctgagatgcttccctgaaagtgggtttcctcgggcagcaacctggaggaagcctaagagaagccatgttgggaatatacatatatagatatatcagggttagtatatatttccctcttttcttttcttttcttttcttttcttttcttttcttttcttttcttttcttttcgaacttttgaactaattcagtagttttggtctttttcctggtgcagggaaacagcaagacccagggcacctccttcggctgtggactgcacaccacgctgaacaggaaccaggggaccggctgcggggccgggcggcgggtccaggacgcagctccagccccggtcagccctgtactgggtccgggagcgacggctcggcccggcataggctgctgcgctcccctggaggcggtcagctgcgcagaggttggggcgcggacgccagggctgctggcagggggctaggttcctgcggagcggggggtatcctaagggagagcgaagccccacaggaggcggaggcccgagggagctgtgcggggtcgtgcgggggagcgggcatgcgacagagggccgggggtggacctcggaccgcgcggtcctgcgggcacgagtggagcctgggctacgcttgggctcgcgcgcggagtttatttaaaactaggaagccggcggccgcgagccgcttgtttatgtaaacccggaaacacccggggggacaggggcgggaccggggcgggaggccggggaggggacaggggaggggacagaaggcgggggccgcgtcacgccggggacgcgcgcgagcgccgggcgcaccagtgccgcgcgaccccgacatgacggggctggagcaggacccggagttcgacttcgatttcctcttcgagttcgatcagagcggcgggggcgccgcggnnnnnnnnnnnnnnnnnnnnnnnnnnnnnnnnnnnnnnnnnnnnnnnnnnnnnnnnnnnnnnnnnnnnnnnnnnnnnnnnnnnnnnnnnnnnnnnnnnnnnnnnnnnnnnnnnnnnnnnnnnnnnnnnnnnnnnnnnnnnnnnnnnnnnnnnnnnnnnnnnnnnnnnnnnnnnnnnnnnnnnnnnnnnnnnnnnnnnnnnnnnnnnnnnnnnnnnnnnnnnnnnnnnnnnnnnnnnnnnnnnnnnnnnnnnnnnnnnnnnnnnnnnnnnnnnnnnnnnnnnnnnnnnnnnnnnnnnnnnnnnnnnnnnnnnnnnnnnnnnnnnnnnnnnnnnnnnnnnnnnnnnnnnnnnnnnnnnnnnnnnnnnnnnnnnnnnnnnnnnnnnnnnnnnnnnnnnnnnnnnnnnnnnnnnnnnnnnnnnnnnnnnnnnnnnnnnnnnnnnnnnnnnnnnnnnnnnnnnnnnnnnnnnnnnnnnnnnnnnnnnnnnnnnnnnnnnnnnnnnnnnnnnnnnnnnnnnnnnnnnnnnnnnnnnnncagctccctcagcaggaaggctccaccacttgggtttccagtccacacctcagctaccagaacctgagagctttcgctatcttgctgtctttcattttctcttctctgtcaaaagtaaagcttccagttaggttaacaatcaatgtgctgtttccccaaacttgaatctcctaaacggttggcagcccattccttgcaccagtttccctcctgggcagtctggctcttgtctccacctgactttctgttccaagttgcacacagtcccggacagtgttctgtgctttccttggggtctgtctcccagccgcactgggacagaacagacatgacacttgtagagcatctccgatgatctgatcgtgtcatgtattccactgacgctcactactattttttttttaagttaaacatcctgttcgcttttgaaggtgaatgctccaacttggcagtcaccactcagcaactgtcatatgtccgcccataagacccctttcggataggttttccttcttcagggcacaggtgtcagggctccggggtcagtgacatgagggcaggcaagactggaagagagacaaccattgggaagagatctggggctagaagtggagggagacccttgacatctcttggtcctgccgctttgggggatttggatttacccgctcttagtgcatgggggcgtttttgagttctctccagaaccctcacactccaggcagaagagctgactcttgacttccccttagggtgtccatgttggatttggatgagtgtgtaccactgtgcttgtggttcccttaggatccgttagctcttgtctctttaagggggagggggtacagccatggagccttcctgggctgtccaagctacctgctgttgggatagggccccacgggcttcctgtgactccttacttacactgaatggacaactgactacagtcccaacactaggaacagacacagagatccaaaacgggtactttggtacctcatggtggcctgaggactgcttggggagaggagagggtatcagggatgctgcagactaggtagtcatctccacagactcagaaccttcgagggaagggtgctgcacttgttcaggtatacaccattcatggatctcagaatccagagttccactggagtcttcgactcatagctggacacagccgctctcaccgtgtctttctgaactgtattgggacacataatgcccaagtttgaggttcatctgggtccattcatggagggcacaaaaggaagtcagtttgggtgccaaaggagacactggtaggggctctggtgaagcctgggaagcaggtggctccttgagctttggatgacgtcctccccttacgcatgtgaggggccgtgctcctcagacatgcttgtgttggttatgctctgaagtagatgaggtagaaaggtgtcttgtgtctcactgcagcccaggccatttgtgatgataccagagtgcgtcgctgaactccctattgctgcacataggtgagtgctccctggagctccgagtgctccctgaactccctatggctgcacataggtgaatgttctctagaactgcacagagctgtagggacatgcctcttggatggatgtccctgtgaactgtgggtcactgcctcagcaaagccaagatgctacatctaagtccaacacctttagcttgcagggtgtaggccactggagagagcccttggcaaggggaccagccttgggaagaactttttctcccttctcttgtgttgacagaaggtgctagagaacattggacatgtacaatacatgttacacttctcagtttagagacagacagacagactgactgactgactgactctgacttttttctctcttattaccaatcccgttattacatttttatcccttgtccaattgcattccttatattacacagtcatctgaagttactaagctctctgctccccactgagcagtagaaggagcttcacattatctggaacgagtctaaacataaattcatgtaggcctgaccgattctgagatcagttgcaaaggaatatttgggttttgcagcttgtcctgagcacacaaaacccacatcatgaaagcggacatggctacctcagagcacagcttacctcctcaatgctgcatgaagggaccccagtatccccctccccaccacaccacaccactgtctcccagctgggtttcatccataggcagagacagcactccacaggcaaccccaactaccaacgactcttcacaactttcttcagatgaaagcatgtgagcagaaatatgactgcttcatctgtggtcactggggcatgtggccctggacacttcctcccagccagggctcttagcaagatggcaagtcttaaacttcagactggtgaaggctgcagaggcagaacacttccagaactgactgagaactacgagagcagacactgtctactcgccctcctggggacacaaagtcacattttggttattctgagactggcaacaattaaagtctagatggttacacttaaaaatcctgagctcaaagcctcaaagactgatgtcatcttgctctcccgagaagggggaagtgcactagttccgctttctttacagagtannnnnnnnnnnnnnnnnnnnnnnnnnnnnnnnnnnnnnnnnnnnnnnnnnnnnnnnnnnnnnnnnnnnnnnnnnnnnnnnnnnnnnnnnnnnnnnnnngagcagcttcactgggctcaggttctatagatgttttaatcaaggacaaacctgtctgtgtgagcaggatatgctagccccgtatcaggttttcaaaagaaacccttggctaagagggagcgccttggaaatacaacaagggaaaggaatgctttaatattcacctgggggagtgtcggaggtcttcgaggaaagatgtgggcccaggctggacacgggacccttaagcacgctgtagtgagcttatttgcggaccattgggtgacatttgctattgctccagcaagtccagctctctgccctgtaaatctccctttagcacatcgttgcatgacagtattgagaacctgttgctgtctgtcacttctcgggactgacccagtctccatacagtcctcattagggagcactatccaatgtgctaagtaaacacaagaacggtgctgcctgccccagaactgttttgtattcttttgtttcatccctaagtgtggagacttgcagcctccctcacaccctgcaggctctattgcatgtagaaagagcagggtgggcaggcattggaggccaggacctggctggcaggatctttctggttctatttctagcgcagccccaggaaaggctaaaggggtttgttccttaaaatgaaaggtgaaagttggctgtgatcggttgtgctctgtgcttgtgaacagtgagtttgggtggtgactccgaaggccataccgatggcagagggtcacatatatgtgagcatcacatacacgtggtgtggcagagacacaacattgtcttcactccagataaaataccaagtgccttaagctgaagcacctacaggggtatttcccagcgggtgccacagattgcccagtgggcagcaggctttctccacaagtcttaagaagacatagaccaggggctgtcatggtgtgcaatgccctggtacagctgcagtagtaccagcttgttgaatttgctgaggctggtgggagctggccagcgcagagagttctggatttgctcagcatcgcctgcctgcatctcatccatgtgaaatactgaatgccgcagggtgattgagagaaatgagctcagaggaataggaggacagacggatggacggcgacacctgcacagggtgaccgcgccttccttttgtattacatggcataagagaatgtgtgcgtgagaggtctttgcttccaattgtgcttttcttccctggtctcccacacctcagtttactggcccagtcagcaaaagccaggctgcggggcacggatgttgccccgaaacagcagcatatgatgttctctaatcagcctcaatgtctcaggattagtaaggaattactgggaagcctggcattcctgatagacccccatagagtgatccctttgaggaagtggaagttggtacaggtggagggctaccccacaggtccaggctttgcagcaccagggaactcaaccggactcagcagcctgccatgggatcagtgggcactcatgctctgaggactctgaggagaaggcagccagctctgatggctgtcacaaagcgagcggctctaggcatgtaagcttttgttttggagtttgaccaaggaaatccatgtgtaagctaattgcttttgttcttaataggttattttttgagaaagggtcgcacctagccccaggctggtctctgacttcaccatgtagcaggatagcatctaatacctgatcctcttgcctgcacttcccgagcgctgggctgatgggtgtaggcgtgcttatgtggacatagtcagtgtcggcattgaacccaagctccctgaaggccggacgagagcttactaactgagctctaccccaagctccagttctgttttcttaataaaccgtttatggattttcctttgccccgttgaatcatattgtattcaaacatttttggttaaagtaaaggccactcttgtaatgtcctggggcccacgtggtcttttccacaacttcctcttcctctgcatctggccgagccctgagtgagaaacctccttcttcctctttctctgggcttcagacaccctgttgctaaggcagccccaaggagacaagcagagatttgccatgtcgtctgcctgccactcagccatttttccccagtaccccaggcagctgaccccttggcctaaacactgcaggggtgtcaaggcaggactcagcttggcttgctgctaggactttctagaaaactcgaaaactcttccaattttctcttccttccaaaagaaggtggtctgctgtggggccaggactggtctggattaaggcggattcttgcacttaggggacagagaatagccaggccctgcctaactgcacgtgtgcctcctttgggatttggcagctcaaggccatgcaggactggtttgggtcttcagcatctggagacatgggcaggtgctgggctcaactttcccagtgtgtgcacagctgctgggatacccatgtttcccattagccttagcctcaaacttccttttcttctggggttgggttcccttaagatgaaaacataaaaaaaaaaaaagatgtatttattttatgtgtgagcattttgcctacttgtgtagatatacaccacatgtgtgctttggtgcctaccaaagtcagagaaggacatctgatcactctgaaactatagagttacaaatggctgtaaaccatcatcatgtgagtgctgagaactgaacccgggtcttcttgcaagagcgaggagtgatcctaaccgctaagccatctctccaaacttgaaagcccgttcttttccagtgttgtgttgttggcagtcttcagacagtgcacggagctctagagacatagggcagcatataacattggcaaaacctgacttcccagatggcttagctgcctgctcaggggtagggcctctgaggcctgggtgctgtctcacatggcctggttaccaccactctccagatgggttcctgaagcacctttgtttagaagtggtgcctctggtagaagttcgaattgctgtgtgatgtcccatatctgctggggactgtgccctgggctctagtatggaacccttctaggaccacagtggttctgaggcccagaaggctggagagagcatagatgatatcatcctgagggggccttttaggtgatgaacaggtgggggtcatgaaggacacgcccatctgggggtggcagtgagtgtgtgaatttctgaagaccttgggagatgctcagaaggggcctggttggatgtgagtgcagcgagaactacttcctgaccgaggcatgctgcggagggtgtagtatctcaggcagcaccaagccagaaatccaagtgcagaggtgaggctgagccatggcacaggcattcttcccggactgtgagattccagcatcaatgaaatcaattcctaaaactcctactctattagcctgtaatttcttcctcctttttatcattagcaataatgcagtgacattttggggtgcccactttccactcctcactgcctttgattgactagttaagacctgacttcttacccgaagatgagcagatcccggccatatcttctgggccatggaacattgaatgtgcctttccatagaaagttttagattgggaagtgctaggccagctaagggagatctctccatcagtatctttctctgtgtttgtcacctgtatgggattaaaaaaacataggatgcatagaaaaccctcttctctccttttcttttctcctctgtctcttcttcttcctccacctcctcctctccctcttcctcctcttccttccttccttccttccttccttccttccttccttcctgccccacctccttttgccaaaatgaatgtgtagacggcctttagtgagaacagcagggcagcacagctctggacatagccatctgttgtgctactcctgaatagggtccctggtaacctgttccagacttttctgttggtaacttcacagaggagccagaccgtctgttggtctcaccaaccagcctttggtcatcaggcttttccacctgaacctgtttcgtatcttcaccaactgggttctttaggattggtgttcttttctcaccatggacagtctgcatctcccatcagtcctccctggggctgcattttgggataccaggggtggcctgtgtctgctggacctgaagagggggggtcactggcagtggacggctctgccccttgtccagtgcttctagaaacaaacactctgagcctagggactcggcagaagtgtctgataagtcccagatgccgccagccacaagtcctgtctctccagaagtattgctttctctagaaagtggctttagagttatttaggacaggtggaggtcatttcagtcttcggctccggcctcttgagatctggattgtggactggggggtggtgcttccctatgacaaggctaaccacagccacggctgtaggctccacttggcagatgcaggttcttgctacgggttgcttccgatgcctcgagctgtaccccattctcctctttgtctcagctctggcctttccagcgcgtctctgtgacccagggattgaggactaccgatggcctcttactggacactggagtgggactctggtccatctcataaagaggcggctgtgtagccagagagggtttgtgagcccattaatggtagaagcctgggagagagcaatagtgggaacttcctaacctacctaaggactggcatgctccttacaaaccatcttagggtttgaccgctgcttcgagaccctttttctggagtttccccctgttggtttctgagccagcgctgtccttgaccacagtatcacgcagctgggcgctgaaccctagtgtggatctaggacttccttgggcttatttccattattcagagacctggaaatgcttgtctccagactcgtgtaaatgggctctgcgatgtggagagcctttctgatcagaaatccggaagcatggctttgctgtcgagtactaattataacaatgattttttaaaaagtgcttaccagagtataatcagcacacaatgatctcgaggtctaggggtgtcttaggagcctgtgttttgttttagacgctctagaagatagattcccaggcaccagctagcctcaggtagccataagagccacactggaatccacattgtcacccttcctctgggtgtgttctttgaagccaaacatttggcctgcttgatagagtcatttgcttgttaacacctatttaaacacctggctccctgcgtctgaagcacctccctccaccgataacaccgccactcttcctccctcccttcacagtctgtctgtccatctttccttctgccactgcccatccatcacctgccattcaggtgatggtctgcctagtcatgaaacaagataaacgtgtgatgtagaatctgaaatacccctgcctctctcagcctttgatatactagaattgcagaggtactgagctgtgttgtgcctggcaccgtctgaggctctgcagacagccgtgaaccacagggcaggctgtgaaagctggcttctgttggtcagagagatggatagataaaaattcctgttaaattgtgatatataccagggtggtggtgggggaggaggtaactcagctattgggtaaggatttgaaatcacaactggctagggaatgtgcattttgaatatagagaagacagtaagagccagccatgtgatgtgaggtggaggacatcttgcctgaggaatgctgttgtgctggtatagagtaaggtctatagtctagcaggaggccttgcagcagtctgacctcaggccattcccagaggctacactctgggcctggagtcctcagggctggccccaggtcttggactcactgcctttgtgatttatgtgtgtcctgctcactggcctcactctgtctttcctcttttcttccagaacactacagttatgtgtcccctagtgtcacctcgaccctgccccttcccacagcacactctgccttgccagcagcatgccacgacctccagacgtccaccccgggtatctcagctgttccttcagccaatcatccccccagttacggaggggctgtggacagcgggccttcgggatacttcctgtcctctggcaacaccagacccaacggggccccgactctggagagtccgagaatcgagatcacctcctacctgggcctacaccatggcagcggccagtttttccacgacgtggaggtggaagacgtacttcctagctgcaagcgctcaccgtctacagcaaccctgcacctgcccagcctggaagcctacagagacccctcctgcctgagcccagccagcagtctctcctccagaagctgtaactctgaggcctcctcctacgagtccaactactcctacccattacgcgtccccccagacctctccgtggcagtcaccctgcgtgtctcccaagaccacggacccggaggagggttttccccgaagcctgggtgcctgccacctgctaggatcgcccaggcactccccatccacctctcctcgggcaagcatcacggaggagagctggctcggtgcccgcggctcccggcccacgtccccctgcaacaagcgcaagtacagtctcaatggccggcagccctcctgctcaccccaccactcacccacaccatccccccatggctcccctcgggtcagtgtgaccgaagatacctggctcggtaacaccacccagtataccagctctgccattgtggcagccatcaatgccctgaccaccgatagcactctggacctgggtgatggggtccctatcaagtctcgaaagacagcactggagcatgcgccctctgtggccctcaaagtagagccagctggggaagacctgggcaccactccacccacttctgacttcccacccgaggagtacaccttccagcaccttcggaagggtgccttttgcgagcagtatctgtcggtgccacaggcctcgtatcagtgggcgaagcccaagtctctttccccgacatcatatatgaggtaagcagcctccgactggagttgggcatacggtaggggtgtggctggggttgagaagagcctaccctggcttctctctggagataatggtatgctagcattcatagcattatgacagtcccctctgtcccttcttctggtgatagctgtctccgcctgcttgttcctcttctaaggacaccttggactagactaggggacccttactttttggaggcgtgttcacaggtgtcaagggttgcagcacatgagttccgtgctgctctacagctctgnnnnnnnnnnnnnnnnnnnnttacagggaggtccccgcacacatgcacagctgtgttggtaataagccgagggaggcagctatcctcctgtggatgttctgcctgctgctcgcccacttcctctctctatgccttaatcgctatctatcaccatgctggggcagatgggcccctcagctcacagtccctcagagcagccagctcaccagcgtgctaccagcagcacgaccaccacctcccgtcttgctggccgtctgctatcagggagtgtgttacaaacctctggtcttaagccgttggtttttctttttaacgggatgcaggggctgcttgcgatttaccaggtccatcgaaccagctcagtgcttttatttttaactaaacagctttcctgtcagctgtaccgcttgcgacgcctggaaggctgctttctgctccagggttttcacttgaggcatgacaacatccactcaggcccgttgaatgtgcgtgtgaaatcagtagggatgtttccatgagctgaggcacctgtgatacccagggactatcatttggcagggacagtctaaggcctgctgcttcgcttttgcctcattcctcccccccccttctcctcagggcagactcaccccccccacacacactcttggggcatcaccacctggtatttggccccctgacctctagatgtagacagtgactatgaagctgttagctccatgcagtgcagccacgtggccgtgtcttgaggggtcactctgggatgtggggtggccagctgggagcggcactgctgaacctgtctgtgagtggcagcaaggggaaggcccaagcaagttgctaggtgctaggagcctgtcttgggcagagagactgagggcaggggtgtggaacagagctgtttcctgtcttgccgcataggcctctgtcgttctatcttgtgtccctccatctgtcctaggaggcccaaagggctagccaagtcattagagcatgtcaggatcaaagtttatctcaaagacgggaaccccaaatccataaagaactgttgtgcctgccatactgtcggtaagacttctagttaacgaaaaccgacttctacttatttcagctcggtcatcagcatcacgcttttgatttgcggtgcatggacagtgaaggtcactgttgctcacaaagacttggtggaacgcctgaggcctagggaagagtcatgtactaaaatatatctggaaccatagaagcaaaggcttcttataagttaagtgcagatacgcacatgcgtggtgagatacgcacatgcgtggtgagatacgcacatgcgtggtgtggggctggagtgagggaaccactgactggtggcctttatgccaggcacacgtggtcttccaggtcaggggctagaagcccaagctgaaggttgtgtggcagctggttcctcctccacgctaccttggcttgcgctagccatcaccccaccatgggccacagccattccttcctttaagtacttcagatctggatctgggctcctgctagtgacaccaacttggtcacctttcaaggtcctttctccagatcagttactctctgaggttctggggctaagagtccaaattagaactttggggacacagattaatatctgactgcctatattattttttttttcggggaaatgacaaaatgtcttcaaacataaaatttaccctttttcctttttttctttcttactttggttttttgtttgtttgtttttgtttttcgttttgtttcttggtcttgggtttttattttttattattattattttttgttttgatcttcacagagacagaggcatcctcactacgttgggcattcctggtggcctacagttggctatctgcccagcccaacctgccagtggcacaggtcctggaaagcagttgctgttttttcctctacttaggagcagtgaccatggcccagtggcctgtgatcccatggtctttatctcatgggctcagagcccctggggtttctgtgatgctatgacattcctatgagcttacacaaacaaacaccaccccatcctgggggttgaagttcaccttttcccactgttttggttcacctcgaaatctgtttcctggtccctttgaatgggtttctgtaaactccctaatggctgctctaggcagctgagagctttcgtggggaggtgacgtgtatggctgtgaccatcactgtgaagaagccagactccttcctcacagatgctcttagtggacaagtaccaggtagcaggaacttgaaggtatccctgaaaggctgtgttcccacatgtcctccagatctgggctggagaattcccacagtgtgaatctacctccactgcccagcctgggcacggtgcctcctccaggcttgtcgatccatcccggctcaaaagaacacactgcagtcgccttcccaagggactcctattgttctgtagccatttcactttagggatcttgtttgttgttttctggggtacccactccctctcctgttcagagcactccagtcggctctatgggacaggacaaagaatggcaccgaactcctgctacaaccgaagaaattgtatttgtgaagctaataaggacagtggaagggcttttactgttttcggcgcgggctttaactgcatgctgctgctggaaactggcaccgaagttgagagaacttgcttgaacatcaccgacagtgatgacaatggcagacaccttctgtgcaggtcgagccatcttatatgtccctgctgagcacggctaaggaaatggccaggagtgacagtgtgcaacagcacgctggcacctgtcagtgtgtgtggagggtgcacaccagaacacatgcctctggagatgacagtctccagtagattgttcctggatgtagttttcagatggtagcttttagggagttgtgtgtgtatacacattcatgtgtgcacttacacacacacacacacacacacacacacacacacacggaggttataagtcaactttgggtgtcttctctatccctcttctaccttcttttttgagacagcatcccttattaaatatgaagcacaccagcccagcgaagcaggtgggcagatgagcttcaaggattcgcttgttttcccacccacattaccgtggctacagatgtgttccacagcacccagcttttatgtgacatctggggatccaagctcaggtcctcacgggaacatacacagcaggcatttcaccatcatgctacatccacggcctctttagagggctttagtattaacccaaaggaactgaagtttaagtgactgtccctttagccattccgttctgagccaaaacttcacagagcaccagtgttgtgcgtcagagcttgggtcagctctgcacagtagcattttctttccttctaaaacagggtcatgggaagtgtgttaatgccctcagccagcctgacctctggacttgcctatagaaaggcaacgttacgtgaggaattcggataaagacgaactggtctggggctagcagaagcgttttaatgaagagtgttcatgacacggagacacatttgctgagttaggttgtgatggcttggccattgctttctaaagaatagaattcccaaggggtggggccgactcagcaaacagcttttgctcagagagacggcttggttcagaagataagaaatgggcactgcgttgaaatcagtttaggtcagaacttgtttctttcagggtttggctgtgatgttggatgccttgatgataccagtggctttgatgatatatacgcacaagtgttagcttcaaaaggtctaagaagtcctcttgcatttgaggttatcggaatagctcagagtttatcgtgagtgggaataagatacaatatgcctgtagatgggtcacaataaatccagctctcatcttctccacacttacttaccacgctcatcaggggatttttgcgttggacagctgttcagtgaatccagtgaccttgtagcctggggaaggcacggtgtcagtgaaagatagttttggttcctggttcctcaggagtgatggcccacctcaggactctgttggccaaattggcctgcccatacttcagacatctgccaaaaacatccatgtctctggtttttggtgggctcattgggtccgtgatggtcgtagattggttgcaaactcgagtctaggaaggccctgaccttctctacagcacaggagggcaagtgaatcggtggccacagtgtgtcttgttcagagataggtatcaagtgaagcttactgaccggcaaaagttagtatcgtgtgccgagaacccacatagactgctagccccagctagcaggtgacaggcatagacaaggtgtccaggcagaggccctggtaggaaagagggaggttgccacagatgagtccatggttatgcagtctgtgttctcaagagctatctgctgttttctcttggctttgtaattggcctctgatgtccctgccacagtttggggaacgcaccattagcctcaccaggtggggtgccatacccgtctttgtgctgtgctataggccccagatatccctggagatttggaggaggggagggaggggtaatttgggactggaaagaagtggctgtcacccaaccagatcttaaggaggctttgcagatagagaagcactgggccgggtcagggctccacacggccaactcatcactgacaaagacaaggaggtcccttgtgaacctgcccagatgctaactgataaagccaggacagacactcaagatgagttgactctaaggcctgaacctctgtgatgctcctgattcttagttgttctgtggagtcagccctggaatgtgctctgtgcaatatgggggcagcaggggcttcagattaaacccaactctccgtggaaagaaggacaccgtggggagcttcggagccagagcctgagagctaactggccccagaggacaggactgtcttctaaggcctttggggttgtgggtgctgcatataagacctgggaggtttgtgtatggaattctcaatccactctcctcgtgcctttgcggtggtacagggtgactgagatgctggttcatgtctgttcacagtttgatacttggaggatgggccttacctcatttgcatctgcctggaaagttagcctggtgtatcagttaggactttcaaggaggctgtgagagccgagctctgtcagtatgggggatgctggcctttggatttcctctgagtactctgtaaagaaagcggaactagtgcacttcccccttctcgggagagcaagatgacatcagtctttgaggctttgagctcaggatttttaagtgtaaccatctagactttaattgttgccagtctcagaataaccaaaatgtgactttgtgtccccaggagggcgagtagacagtgtctgctctcgtagttctcagtcagttctggaagtgttctgcctctgcagccttcaccagtctgaagtttaagacttgccatcttgctaagagccctggctgggaggaagtgtccagggccacatgccccagtgaccacagatgaagcagtcatatttctgctcacatgctttcatctgaagaaagttgtgaagagtcgttggtagttggggttgcctgtggagtgctgtctctgcctatggatgaaacccagctgggagacagtggtgtggtgtggtggtgctggtggtgtggatgggtgtgtgtgcacacatgcacatgtgtttgtatgtgcatgtacatggatgcatagacttgaggacatcatcaactattactacccaggcttcgtccacttttttctgtgtgtgtgtgtgtgtgtgtgtgtgtgagagagagagagagagagagagagagagagaggtgggggttctcttactggtcttgcttgccagggatccccagggatcgacctgttttctgccttcatgggtctgcctttatattttgccccctagaatgtgggttctggggactaaactcagctcctaggcttccaaagtactttgctaatggtgccatctccatggtcccctgtctttttttcatctactctgaaatcccttctggtgacaggagtctgagaggcaggcattgctgtacttggaagaatagccagggaagctgcagctagtgtgggattatgggaacacttaccacatctcctgaaggccatgtacacgggactattacagacctctgccaggtgaatcacctgtaaggcagagaggacttgcctgccgtgatagcttaggcaagacatgtgtcaccactgaccgcacctggccattggaaggtttcctttgggacatggtgatcatatgcacatattcttcagatgcaaacattgccaggaggtttgatataggagtggccatgcaccgcagccccggcccatggcattcctggatagattggccacccagctctgcctctgatttataagctgctgtttccagaacaggatccactcaggtcaccaagatgcgcatggtgcagacagagacctgtgcaaatgcctagcttaacccatgctaggtgactgtggctatgtgtccaaagctccaggccatctccaggtagtagttttctatgatgaccttgtttttgctggaaccagacctctagagccaagaagccctgggcagccagtgacactgatggcctgaaatccctaagctaggaacagagctgtggtgccttatgtaagtgtcagactgcagttgtcaattctacaggaggcagggtcttggctgcatgtctaggatctccaaccctgggccaaggtgtccagactgttccgtgtctcatgatcattaaggaatatctgccttgtgacagcacagggaatcatggctgacgggaaggagcttgcttcagacagtcataaatggcagtggcttccctatatgttgctaccatgttcaacagactgaaccaactttcagaacttgaccagcaactgtttggacatcaggctgtaggtcacggcagaagtgtgtcatggcagaagtgtcccgtggcttgcgtgtgctctgtcctgcgttcacttgtgcgacgtttgggttaccgtgtcagtttgtttcggttttcatttttcataagtaacgcatggcaggtgtggcctacagcatcctcatcattaaaacatcagtgatacgaatcctgatcagctgcagctgctgggcgtcactcggtggctagagaaaggcacagtgtggaagaggaagctgggtgcacaggggaaatgcagggtgtgcagatgtcaggcctgccccggggacagagagagctggagaggctagacagctcctttcccacaacaaatcctcctgagaaatattctccatctgtccttccttctttctttcttctttgttttccagtctgaaacaggtaaacagggcagatacccttctagagtctggctagagacccaggagcccagatctcctggaacctggagattcagcctatctcccgagctctgtcctccacccacccaggatgcaggtggtaagagtaaccctcacaacgatgagatacccaggcttggaacgcagttctgtggcttcagatgcacaagaggctcatgggatatccatgggccagggaggtcttagggtgaagggcagagtgccccaaacctggaagaagcatttccttggagatgtcctgcactctcactggtaagatcttgggaaacagccaatgtatgaggtctgtgaatctgctgttttaacacacacatgtagcatgcacaaactcacatgcctgctgtctggatcctgcaagttccagatttgtgactttgacttggtctcccaagccagtcatgcactctgctttctgttacagggactacatgcctttgaggctttgctatcttccttggcaagagtccccagtgtcccctgtcctgtgccccagccataggaccagtacagggactagggtgggtagagctcaggataaatggaacactcattatgattgttgctcttaggctgtgtcaggaccaggatagcagggaacgtcttgtactgcacagctgttgtggtagaggctggaccacaaaaggaagaggccagcagaggacagctcctttgtcccgagcctagctttaggtgggaaagttggggactgggccattttccttccctattcctgcttatgcctgtgggtggggcccacactgagcacccgtcttcctcgtagatatagaaaagtgccacttttagtaacatgcccaagatactagtccaacagacaaggatggctggtcacagtctctcgggcaggatggtggtgtgccagagcccttaaaatattccaaggtgtcctggttgctgaggccttgctcctatccccaccctttccatctgaagaggaaacattttgttaagggtcagcttattggcgcctgtggtccctaaggtcttcccaggttgctttgggaaaggtgggaactaagagacctggactaggcaaccaggaatcctgtgcagagatggcactcatgtgctgaccaaggaaactagcctgcatgccctgccccaccaggccagcccctgggctgtctgtccatcttggctgaggtggctaccagtcctcttctgtccaggcactgtctggacctctagaaaggccagcccctcttgggcgaggcaagcattcccaggctaagagtcctgtggtcagggggccacagcccagatgtgcactcttgacagtgttgctgggtggtcctgggcttggccctggatggatggacagatgaagcccttgaggcccaaagtttgcagaaccagccaagaagtgcattgatggccttccgcaaccctttctccttcctcatctccctgcctccctccgtccctccctcctcctcctcttccttcttcttcttcttcttcttcttcttcttcttcttcttcttcttcttcttcttctttttcttcttcctctctctctctctctctctctctctctctctctctctctctctctctctctccttcccctgttccttcctatttgactcttgaaacccttggtctttcttagttagaggaagacctttggctgctgcccccgtgttgatgtagtcgaaggtcttgtttccctttaactggcttccatttttttccacataagcagactttaggcttgggttaggtttgtagttccatggacctcagggtgactaaagcatagatggtcttcacggttttccttgtaagatctgcgcagagggcttttttaactatggatggttcagaatcgaaaggattctacccaaactatgtaagcaaatctgtcccctctgagttccagtgcacaggaattaatcttgtacctgtagctgggatgactttccatgaaagttggtgcagcctgaggaccggtgcttagctccccagaacacacataaagctagttgccatgtgtacccataacccctgaaggaagaagaaaaggagagataggcttctctttagaaattcatgggctagctcaatcccaaatgggcagcaggaaccaccagagagaccctgtcttaagtagggtgggaatggatggccaacacctgagattgtcttcacacatgaacacatacacacatgcacatgctgagttacaaaggataaacacactcaggattctttgttaatacaaacagggttcattactgtgaaacctttttcttcctgacccccaaatctccatcccgagacagggtttctctgtgtagccctggctgtcttggaactcactctgtagaccaggctggcctcaaattcagagatccacctgcctctgcttcctgagtgctggggattaaaggaatacatcaccactgccagactgccatctgccattactattatatatatatatatatatatannnnnnnnnnnnnnnnnnnnnnnnnnnnnnnnnnnnnnnnnnnnnnnnnnnnnnnnnnnnnnnnnnnnnnnnnnnnnnnnnnnnnnnnnnnnnnnnnnnnnnnnnnnnnnnnnnnnnnnnnnnnnnnnnnnnnnnnnnnnnnnnnnnnnnnnnnnnnnnnnnnnnnctggcttgccctctgcccctgtgtgctcattctgagtgcctgttggctttctgaagctcatctgcacatgttctgatgtgtacaagacgggaattcagccttctaaatgtattctgacactgttgcctcacctaggagctcacacaaagcgagccctgatctcaggccggtgtttgcggctccctaatttggaattttcttagcagtcgttgggcaaggcctttgggtggatcctttgtcagtcagcattccctccctcctgtctctgcctctttgcttccctctcctctctcatcctggcagaagctgtggggcactcacaccccggtatggatcttggtgaaggttgtttgacacttctgtgtgtcagattggtgtgagccctaaggcacgctgggttcagactgtggtagcccagtggtctttgtgtgtctgtggctgcagatgcctatgcctctctgtgggattcagcgacggctttaaccctagaggtcagtacacagagcgagcttgccctttccaacacctcccaaggcagcaatgaggctcctgggctataaattgccattccctggccccacccccaccccccagaggtagattagagtctggaaggcaggggaaactatgtggctttgatactctcagtccttagctgtcatctgcccagcctggctccgagctctggggcaggtaacacctatgcttcctgtggtgagcacacttctgagatgcctgggaccctgtggtcgtgaaaaggtgagaggcagaactcagaacaaacaggaagcaaagctttgtctcgaaagactctgttacccatgggtgttctttgagtatcacacagctgagatcggtgcttggttccagtaccaagatccaggtgcttggtacctgtatgaagggattaggagctgggcctggagagacttgtggcccctgagccggctggctgagctggctgaggtgctaatgaggctgtgcagaatctctgcttggaggagagaggaaactggcaactgccagcgacaggaaccagggaacgtgagcccactgtggcctcaggtttgggatctggtttggagttggtcactgtgctgtgacctgttcgccacagcattttcatgtttcctgtcagtcggaggcagagccctttctcatgggaacagtgattcaaaacaggagagctggtgggttctccctgcgctgcgcccacataccaagcactgtggaaggtctgactcgcccattatcaggagaagctgcccgtcattcccacgcagcctgtcctcccatccctcctcccccagcatggagggtacatcagcctggtcccttcagaccctacagcaggaggccaccctgctttgtgacccaaggaccctcaggaccccagaatcaaggaaaagacacacacacacccacatgggcacacacacataggtagacagacccatgcacatgtgagtgcatacacaccacacccacgtacacacacacttgctctcacacacacacatgtacatgtgcgcacacacagacatacacacacacatgtgcacacacagacccacacacatggacatgcacacacacacagacatacacatgcacacacactcacacacatagagacacactcatgctcatgcacactcatgctctctctcatgcacacaccattttcttgagtgaattcaggaaaaaaaatctaaatgtgtttagaaccgctgaatgcatgcttcgaacaggctgagaagggccgtgggtacttgatatgaagcttaatgagagaaaaagagggctggctcccagatctcaacatttaacaggctttagtcagcacacacggcccaaccacaggaggctcacctccagtctgcacatatgttttattctgcgatgtgtttcttttaattatttatttagtggttgtgtcatcatagtgcacacgtggaagtcagaggacaacttgcaagaatgaaatctcttctagcgtgtggggggtcctggggatcaggtcttcagacggggcagcaagtgtccatacctctggctccatctctctggtgcttagcgagggtttttttaaaaaaagatttattttattattttaagtgtgtgtgtgtgtatggccatgtgcctatgagtgctagcgaatagctataaagcctggtgatgctggctcctcctagatctggagtcactgatagttagcattctgacaggatgctgggactcaaatccagcttctctggaagagcagccagtgctctgactcaccgaaccatctttcaagcccctgtaacgtgtcttaggatgttggttgtatgtagttaacaagtcctgacactcagctctgacgtgagattgctcttcatagatggcagtttcaaaacaggttgggagaaggtgctagacacatgatatctgacagcgctggtggcaatgactgtgctttggtgtggccagcctctgctggggtggaggctaagccaggaaaagtgtcccgaggccttgcaaggtcttcagtaagacacgggaccgaaatcaatcagatgattaggggccggatgctttcagaggcttgcttctgggtcagcaggaagttcacactcagatcggttctttacagagcgtcactcctctctgttggagtcaggtgtcgggtggaggggcaaacagcaaggatgagaatgttctgaggggcggcctggggagtgaatacagtatacaaggctgacgttatgacacgttggtgccggggtgggagacttcctgatacttttgggaagcacgaggctaacacctcaggaaccccaaactgctgaccctgttgtcaggacagggtaaagatacagtccctgatttaattatgtgaacattaaatcaatggcgtctataatagcaatggactggctaataatcaaaggccagccataaagtaatattcgcctaatatttgtagtgctgttattaaacaaagttcttaccaatgaaagatgctcaaattttaacctttcttttaaataatcaggataccaaattatatgttttgccaagacactccctttctgtataaaatgtgtgcacatccacaagttctctaaattgggtcacacgtgatataagattttaaagtgtgtaggtaacttcagattacttcatttatacaaatcaaagggtctccgaggcctgccaggccagccgttttccaggttgcattgagtgtaactcttgacaagatggaactgaattgaagatgtgtttgaagtcaaaaccctgggtcactcctgagtgcacaactctagcaggcaaccacagcccctgggtctgatgtcagagaccctgtggcagcagaatcatgctgacaccctgcagtccagaccccagggtgttcagccaggtttccccctctaatctagtccccatctctgatctaaagtgaagtcctatgggtttggagagctgtccgagttaccgtgaaatttttcaatccgggttgacaatcttaaatgtgtaaaccacccttctttttgccccttttcattattctgtgcctgtctgtctcctatctgcctgtctgtctgtgccactcactttttaaagattttttcctctaggggttgaaactagtccttctcattgtgaagtttgctccccccagctctgtccacagccagtctttctgtgcagatataagaaacttgtgtgcatatataagaaacactgtgaaggtgtgggatgttttacagtgcctcctcccacaacacctgggtacccattctgcccctggctttgaggagtctggccccacagccctggaaacacaccctctccttgaagtaggagtctgctcagctcccatggcgtgccttccctggggatgccagcctcccttctggccaactcctcctctctgatgcccgccttccgctcagcaagctgctggaatcagggtatatgacacacacaggaaacggccctgacaggcctagcgtgagtttctaagtgcacggcagcccttccagaaagccttaccccttctgtaatgttactctggagtctctgtgagcactgcggatgggccaagcctgtgccgtcagcctgcctctgtgctgggcagatgcaggcacttactattgtgtgtttgtgagtcagattcctagagggatgacccagcttgtacccgaatggtaacaaacacaggtgcatcttgttaggactgggctggaaacaagggacgtggcagtctggagggaggagttctcttgagtctgctgtagctcggcactgcagagggaagttattcccagagccccatttggccaaaggtgcctctcagggctttctttagagaagggtgatccttcctgttcctggtgaagagtatccagagtcccattgctgattctcctgtctgcaagcaggctatgtctgcaccacttccatggctctgggaagtagattagattagcttttaaagactggctgacttctttaattcatgaagcactggcaagctatgaccacacacgattgcacagtaaccatggccttatgaagactttactcccctaccaagatgctgctggatggtatcgtctgacaactgtgagggctgatccccggatggtgccccaggcacagcatgggcaactctgtcttggtgtacccacacttaaagctcctctgttcctttgcagcccatccttgcctgcccttgactggcagctcccgtcacattctggtccatacgagcttcggatcgaggtgcagcccaagtctcaccacagggctcactatgagacggaaggcagccggggggctgtgaaggcttcagctggaggacaccccattgtgcaggtatggcatctgctctgaccagccaatagctcatacctaaaacagttttggattcacagctaaggactttactcagacgtaaaacacagtgacctcagagcctgctatgttccttgtcttcaataatgtcccagtgagtccttcatgaactggaaatgtccaaagtcaaagtgtgttcaccgtacctcactgaggatgcatcgtctcgcaggcactgcagaggcagggcatcagccactcttctcctcacagagggaatggctgagcaaatgcccaagtcaaaggatattttgtgtgaatgggtatcactttcatactaccatcaagttaaaagagagacagtatgcaggaccactgtgaatcaagggctgtctgtggctaccatataatgcttttcattccatctataatggttttaaaggtttgcccagagcagacttacttgtggagcaggcaccattacaccaactgttctgcaactctctttcaaaacatctctgcccctggagcggatgtgtgctctccacccaccccacaccacacacgtgggattggtggaagcaccaggtctcaggtctccagggcagcagcctctgcttctcagtgtgcctgcaggtgttaggaggtagggtctgagggagcgggttatgagatggagttctgagggaaaggtggctgtgatgggcacagtcacacttgtggcattttggggaaggaaaatagaaatccaactaacccaagtccaagaatctaggagttgctcggttccacgagactggttgtttcagctggtctgcagtagaagtaggttctaacagatgtgctggtatgtaagtgcaagcaggcaaagatatgtgaatcctccttcttccaatgtccttatgtaggcctccaacagagggttggcctaccacgtctggatctgggacttgctttgtcccaggctgaccttgaactcagagatctccttgtctcagtctcctgggattaaaggcaagttttgccttgcccggggcctaagcttttcatggccactatgcctcaagatctccgtgttaagatccaggttagaatcctgcgtgccctccatttcttgattgtacttcattccagatgtagtcaagttgacagccaggaatagccatgacactaagtttccctgagcgtttaaattctgggctgtgatatagtttgtatctggtacgctgctcaccaatggtggccaggaggcacactggaaagtcggaggcccagcaacgtcacaggtccagcttggtctttctccacctggacatcagtgtgacatcccaatgggcggggtgagtttgtcttggcttccctttgtcacacccgtccccttgtgagctttagatcccagacattactgttttaagcgccgccgtgaagtgctcactctccggctgactctggtcacatggtgttatggagagctctttaccccagtatcccaacatcataaacccgggtgcccaaccctgttatttcaggactgatgcaaactggaaggggtactcagcagggtaccctgtacttttattttattccatttaggtaaataaagagctggcaagggcaggaggccatggagacaaatggctgtttgccaacgcagcaatcagccacatggaatgagccgggcgaggtgcagaaacgaagcactttagcagcgcttgtgggtgatattaaggtgatatttgtggcctgtgtgctcgatgccaattaatacctactctgttagccgcttgaggtgataaaatgctgggggacatcagtacgcagcagctggcttgacattttaagtttctccccttcgcaggtggacgaggtcaggtagcctgccttcagctgtgttgggtaactaccggtatttacctctcctttgcccgctgtggttttcactgaatgaaagtgcattattgctgaatggaacagattttaataggagaggaaataagtctgttaaagaaaggcaggggagtaaatggagagataatgcctgggcgcctccacttacttggatcttacagccaagtggcgctgggtgagagcggggggtggggtgggggtgtgtgtgtgcaaataccgtgccctcatcagaaagatggagcttcaggtgcaggtctgtgccatcttgggcttggtggttggtggctgtaagaatcccagctgctttggggcgataaagccagaaggagtgtggggagccctgtgtttgggggaatctgtgtctgtcagccacagatccccactgtcttgtgtgtcagatgctgagccgaagtgctgcccctagagaaccaggtccaggtgtcttgagctcagggcaacagtgtatatctcagtgcagctgatatccaggaaattgaagcacttctgagggatggcaaaatctaaaacagtgtttaagaagcaccctctaaattatttaaggtggcgttaggggaaggtggcaaaaccaggccaggccgccgccactgccacagaacagccaccgcttctacaacactgttgaagggcaaaggaaaacaccccctagctaaaaaaacacccagttcggtggcgtttctcattgtgggacattagcaactcaaggggtttcctgggatattctcccaaagtaaactcacacctgtgcccgcgtgaggaaaacagctaaaacgagggaattttaggggatttgttttctcttttggccggtggaccacaaattagataaaaataggatttgcacgtaattatgaaacacacaaaaaatagaaaactctcttggttgccatgaaagtgctgtaaccacaaagttctacctcaggcttctgggttattttgatagacccgctagtgccttcagctctgatgtccaactgtcttgctcttggaggggcgaggccatgggccagttcgcatgcccggtgtgcggacactccacaagccagtttgtgcccagtagtctttgtagcattcctcactgttgagggcttctatctcacccgagaggtctggactcaccgttcaaaatggccacaggctctcactagccattctatggtcaccaagctacccaggcttcaaaaagtctggccttacagtctgctagcatttgaaaagccctatcagaaggcatagccatgggttatcctggaaccaaggaagggttgggcagggcttatctatagttttcctcgaagttcccaggaacgagctaccttgcagcccctaggtggacatggtctgcacaaagtccttatggagatatccttggggacacggtggctccattcagttaaccactgtcttctgtcagttactgagacaggggctcctacatctgtctagagcatgctgtggtcttgcttctgatgtcacattgtaatgtgagaaatggcctagatcttccttgactatgacacttgccttggtagagcagatgtcacaaatactctgactacaacaggggcatttggtcagggcttctccagctctctccagcaaagtcttcattgagtttcatccttgtccagcaaggtccctcgtgaccttgatctggcctctggctatcaggtctctgtgtctgttgggtcttagccaccactgactgaggatccaaattctccagacgcttggcaggggatgtgatatctaccttgtcctgggctatggtggccttacgggctcctgcctatagaggcccctactgtagcgcatgcaatgctttgtggtttgaggattatctcccatccgggggggtcatggactccagctctgtttaccaatcaccaaaatgacctgcctgatagcatctgcgcatcacacacaggcccgctctgcttgaataattaataggccactgaaatatgaacactcagaagctggtcagagcctaacatttaggtttgcagcatagggcttgccatttaggacagtgaccagcatagctaccgcccggccgtgaaggactcagatcaaagagacacagatagtgtcccagacaggtgaccctggactctgggtagaaataagcgacatgctctcagggcacagacagcaggtacctgaggatctgttggaaccagggcagagtcatagaggaacccatgacaggccctggcttgtgctcctgcaccggggccaggcagtggccagtagggactcatgacattagggacccttctgaggttacatagcttgcccccaccccatatagattcatggcagggactttttctatcgtacagtcctttgacagctgaggacatccactggaagatgacttgaatttctcaggttgttcaaattgtctttgagctaagcccttgttataattacttttctttcttggtagtgtcttttcccccaggtcctatgaggagatttagcatgtcaaaaatactgtgagaagtcagttccgaggggtttctgacctgtggccagaaggtccctcgtcatttggtttagtggcctggaatgctctgtcccgtgcgagcctgcatcaccccggattccaggtctcatctctggaggctaacacagagccagggtccctcaaggtgttctggtcagagcaccagagcccaagggcgagcttggaaaggcagcatttcactccggctgggtctgcaagctggtaaggcatgcatacagcaggggctaacctgcaggcctgaccccaaagcaggagcatgctgcccagagtcagccaacctgcatgaggtctggattaattttttatggatcagcctggacactgcatggagtcctctctcctttcaggactcttcgaggcaaacctcctttccctgcctgtcatgtacagggtaactctcctgtccacttggatgctgcccctgccttcttcacccacactcagcaccaaggtccagtgttcagaaaacgtaagggtctcagggaattccatgagggaagctgcagtctcccaaacacaccacagctttgcttactgtccatggcagagctaaggctcgacagacaatcggtagtaagagacgagccgtcgttccaggaagacatctggggtcagctctcttagcggtgggagagtgaagcagacagagatggccgttcgcttacacagtctgcagcagcatccctgacggcctctgctaagccgtactgacgtcctcaaggctggggtttcatgtggctgggctctctgtgagctcatttcagagccttcccactcagcagagtgggaagcagggagggtattatgtggactgtgggaacaaagacaaggcagggctacaagcagaagcctccccaaatgaagatcctgcaagtctgtcaccaaccccccccccccccagacctgactcagaagctatggcttctttgttccaggctaggaagagtttaagtgatgctagtctgagatacagaacctactggtggttttctagtcataggcccacagagctctgacttagttagggttcagatgagctaggtcagtccggcccctcctctaccctaccctccttggggacaggtgagatgagggctgagtattggagacaaaacaagaaccggcattcgtgccaatagccacggcaagaagtgagccacatgtctccagctggcctgtgaccatgcatggaccttcttcctggtaactctgtggctttccttggcccagaggacccatacgtatcacaagtgtccctggctacccatgggcagctgttcaaatgtagaaaagatacaaactgtagagtgttctcttgggaggctcggagggactgttgtttgctctctgggtctgtttgtgcaactggccctgcctcatcatgggaggtggggtgcagacagactactgttgtataccttgcctggcctaaggggcttcctttcatctcctggggtagcactgggctccttgcctatgtggatggctgcagtttgccctgtagctgcaggatggctgcaggccttgcctagccaggcccagaaccatgacctcactggtcatgttggtagatgccctcagcaaggacctcagggctgagagaagaagcagatgaagggccgatgcccctctggtataacacacagggtctggggtgccatcgtggcatcagtacaacaggtagcctttgtgagcttcaagtgtttttagtccttcatcttagattcccagccctgtatcctcagcgttttgggctctagtcagacagtaagggtcaggttctctttcatacactccatggatgcttgatgcatggccactgagccctgtggtccacgatgttaacagtaaaaacccaccagaacgctgacagccgcaggccggaccctgcaaggtagaaggaagggctggagttcaggacagcagcactattccctgggcgttcccctacatttctgggcttggcatcaccatggtagcacgttgtgacgtactacatggcacggctgctcctgagtggcctctgccctgtaacactagcctagagtgtcaccacggtcaccgccgcgtcgggatgattcccaggagagtgtacaggtggcggcttcctgagtggcctagtctatgaggtactgagggaggcgtctgtgtttcgagtgtctgtaccttcgtggcagttttacagaaggagtctgctggcgttggtgcctttttccttggatttgggtgggcagagagtggatgaacgctgccatctgcagggccagcctcagggatgctaaatgtcagagatgatccgggttgacatgcgtgggggtaactaggctgattcctggccatgccaacagttcctgagagcactgagacccctggggccttaaaagctctctttgccattgccagtaggtgggtgctaagatctgtcctacctgcgtgttgctcgcatttgtgcctctctttctcccctggcccctttcaacctctcaggcttggtgggaatcggtcccttgcaactggaccattgatcttgtgcagaacagatggaccctggttcagccacgtgcccctggtttaaaattcccacaataccatgcccaggtattgaaggaagggtcccattcattttttcaagtaaggggtcgaggaggttccagccctctcgagtcagcatgcaaggcaggaaagtggccctctgggagaagagcagaggtgatgctgggctggagacatatagagcctccctgaggagcacagagcaggcctgtgttccacacccaggtgccgtggctgtgagcagcgatccttagatgtccactctgaccttgtggcaccacaggtcatagaactcacatctgatggaggtcagaggctcagggataaactgccaggaaactggtttctccttagcctggcatctcccccttccccactgcctatctgcctcagccttcctcagtctaggaggagaagcacagactttgtgagtgagctgttttctgggatgggacggaagctccctttccgggaccctatgagaaagtgagtctggactctgacctccggaatggcacaagatggccctcggtgcatctgcacatgcgcagagcctcaagagtacgcgcgcttcccagataaagacagatctagggttctcaactctaataggtccgttcaattggcaggagagccacggagctcgcagtccttttcagaaagccacagagcgtggcttcctcctggaaaacctgcaccaggaccttttatatgagaaactgtgccagctgctggggagggacaggctccaggaggtgggggtggcttgcaaggcctttgtaaggaaggaagcgcatgtttgagcccagtgccaagccttttcctccgtgcttcaggaacatcagactttctccacaggagactgttcgctgtgttggggatgaagcttgggtctttggggatacaggcagacatgctaccacttaagcccccaagagataattttgaggtaaattaaacagctgattactagaggcctggaacagcttcaggcccccagcaaggtggagtgactttgccagtggaaatcaagtccccatgaaggtgctctcagtgaatgtctggcaggcatcgccaatgtatgtggtctctggcatttatgccctggtaatatttacatggatacaacctattttgtttttattctattttttatttgtctgccttcttacaaaggtagaggaggtttgtacatgaaagacccaaagttcctacgtgcagtctctcacagctcccctgtgctgccctcggcttcagacttctggaaggcctcgtgtgtactcgtgtatcttagctcttggggtctgagggacgtcactagacctagttttgcctgtgcctataaacctgagtttgatcatgggtacaatagttgtcttcataggaagagtcttcagaattacatgatataaattaagtactgttgtgggctcatgacacatatgtgcacacacaaagtgctcacatgctcataaacacgtgcttgcccatccaggcacacattcatgaagcaaatgcacagactctaaaatacatgagtgctcatacagtacaagcacaaatgcagcacacacacacacaccatacacacacacatacacacacacaccatacacacatacacacactcacacacactcacacacaccatacacacatacagacactcacacacaccatacacacacaccatacacacacacactcacacacaccatacacacacacacacacacacacacacacacacacacatacacgcgaacacacacacacacacacacacacacgcccatggatgttcatgagataaacctgtacactgttcccacataggtcatatttataccaattcataagtgcatacatgtataaacacatgtatagttatacataaatggttgtacacatgtcacatatagcaggacatgcacacacacatgcatacctgtggcaccctgaaagccaaggattttttttattttcagacagagctaatcactagcataaattctgtgggtagcagattccactgaagggcagtgatagtaactccttccttctgtcctagggagctatgcccagaagctcagcctctgcctgtctcgtggggaagccctggggccttatgtcctgcagcctgtactcatttgctgcaacacagccgctcacacagtgagagcctagtagtcagcgtgcccctcctggttatgcagaactggacaagccctgtctgtttgccatccttccaagtgctcctgagtatggaaaattggttttgttattggtttggtttggttttgcagtatatgttaggcaagttccctaccactgacccacgctcctacggtcaatcttacctcttcattttgaaatgtcagtcttttctttgagttgtccaagctgaccttgagctcactctggaacccactgagcctttgaatgtgtggcccttctgcctcagcctaccgcgggctgcgattataggcctgcaccacacagcctagttctcagtttgtgcttaaactctcctactgagcatccatgaggggtcctgccctcgatggtcatttctttcctaccagacaggcacacagtgccatttggagtgacagacagttccacagctggtaaggtcttcatgctggttgttctgaggaggtcacccttactaacagcagccgctccccagggtctgtgcctctggctaaggctggtgtgagagccccagttcaccagaatgacagttggctcctaccctctcagattgtggggcaggaagatggatcagaattagctcctgtgggtacagtgaggcctccagggcacagtggtgagttcccaagatgcccctgtaccctgccaggagaccagcactctgcagtctctaggagagggaaatagaacgtccaataacagaagacttcccgtgtctgggaagagatgtctccaggcagcggcgtttgtaatgaagaattggggctgaaaacaatctgaggtaatgagagtccaacacaaactcttaattaaccaagtagagggaatttaggtttaaaaaatagtgaaacccaccctgggtgccatccccagccaggaggagggaaagtgagaccaatgtgtgagccgatttctcttgtcttctgggatatatcacgggatgctaatgttactcggggtcttaaaagcaaatttccctttaagttgattgtttcaagtgtgcattatgtcttggtggaaggatgtcacgtgacaatgtcctttgcttagtaaccaagtcagaatgactcgctgaaaggcagatggttttcatcagttaattggctctgttaattcagaccttccttccactgcgtatgaaggtgtgcgtgttggcccaactccagcactgaataaatttgtcctccatcagtctgctggcctgtcatctccctgtgtaagtgctgaggtggcacaggagctaaaaacaaacatttttaatgtgcaggaaactgggggacgcttacaccttgcaagtggaataatgtgttttgtctcgtttagaggaagcagagaagacttgggtctgacaggtaactttataaatgttgttctgacagacactgtgagaagccagaggcagaaggtctgtgcagggggatgtgtgaagtagcttagatttcttttcttaaagtgaacttcgtgccttaaataatagatatttacctcccagggtaagctttaaatattcctattttcactgaaatggcatgtttctaatggataaaattataccgtatacaccgccttccatgcctaagaagcctgcnnnnnnnnnnnnnnnnnnnnnnnnnnnnnnnnnnnnnnnnnnnnnnnnnnnnnnnnnnnnnnnnnnnnnnnnnnnnnnnnnnnnnnnnnnnnnnnnnnnnnnnnnnnnnnnnnnnnnnnnnnnnnnnnnnnnnncataatttgtctctgaatttctatctttattttttttgttacatttcatattgtaaaactattccaatcttatatagactagtggtttctgagtagattcatcacactgcaagaggctcccaggtgttgaggggtctggaccaaccaaccttagttgttaaaccctgtttgcagtaacttgtgtgttcacacagctttgtagtccctgcagattaagacagtgttagatgtgatcactggccagagagtagcagaggtggctttctgcgctgatggcctcagatgggggattgcaatattctttcagtcagccaggcccacagcaaatgggggagtttgaggggaaatgccctgtgctttctggctccacccaccagccttaatcaaggctgctgttgtctcaggatgcccggggacctgtggtcagcaggcaccctttacactcacacgtgtgcccttggcacagagcacacataaaagctgcacgggtgaatctgaagcgatctagctcatagatgctgtgactatggtacaaacagggagcaggtgcctggcccaagcccagagagaagtcgttccatgctcacttagtatacaaaacacacggggtgcgtgtctgtgagtgcgtgtgtgtagtcacgtacaacaacactgccacctgcacctgccccgcagactgtctctctctctcacacagggatcctccttgatacccgtacgtgctcccaacccatgatgctcagagtctctgctggctgtgccctactcatccacggctcctcacaggacacaaacattaattttaaacattaatcagcagtacctgtaatgctgcccagaggcctggggaggcaaagacctcctggaaccacctactgatgtcagggagtgggttggctgcatattcaggacactgtaagggccaccaccccatctttgcaacacagattctcgtgcgtacagttgtgacacctgcgtggcgtcagccgcggggaccactgggctgttttgatcagccccttcatcatacagtctgctgtgagctctttattccgcactgccctgtctggtgttctcagatgttctctggtgtctgtcagctttccttctatgtccagaagtgaacgggggtaaggctcatctccaacccttaacttcctacccatcaggaatgggccatccaacaggattatttcctgggaatgcaaattcagagatacagtccctttaagggaatcagatgagagtctgcttctttcaataacagggtgtggagagagagagatgtttcctgtggattgagctgtgctgtgggttctggataggcgggcccaggagtcgccagggcattcttactctcaagtctaaacttcgtgtctgtactgaggactctcttggtctgggagggagtttgagggctcacagaaagttgtcccagcttgcctcctgggctttgaattgggaaaggagaaggttttcgctgaagaaaaatgatgggatccagggtctgcctcagacaggctctcacttttgccttctcaaagctgtcagtgtctgtcaccttgtgccaagtcggcaggaagaggacagagttcctcccaagcctgtgtggaggtctgccaacctccccgtggaagcggtctgctttcatcccagccatcagaggtgagcactgctccacctggccccttagcttattaaggcaacacagcccggggcctctgccccattaacctctgactagtggggaacacatttttcttgctgccgctcaatgaacttgagcattcgggctgtacctgtttgaagtacagtcctggtccccagccctttcatcttgaggtaggactggcactgactgtgtgtgtgtgtgtgtgccacatgctggtggatcacaggacataatgaaagccgtgaagtgcccatgcctctcctaatgagcaactggcatggatcaggccagaggcggtggctgagacctttgcacgagggacatgtgagaggccccgctgccttgtaaaaccccgatacccacggcccacatcaaaatccagcagtagctaattgcactgtctgattttctggtccccacttctaggtttcattgcctttttccaatgctttaaaatgaaaggcacaatcccctaccatcccgaaaggctggaattccatcggagagactagtagtaatggctggaacctggtgtcctctgcactcctccctttccgggtacctcccttccccccctaaggatctgtggggctatttcttgcggctgaggctccctccccattcccaccacagaccaccttctttgctgcaggactcttgaagactgcttggtgctttcttatggtgccgttcaccatcctccttgctaaaaccaattacctagcaatcccgcaactcatcacagggctctgagttccatgttccagctctcctcctttctgcccaccttctggccaggccattcctttgtggtcggcatgaggggctgggggcttatccattggcaaagtggatgacagcaatcggagaaggctataattgtcatcgactgagtcctggcagccacctgtgtatcctggcatcctacagtgtatctcatccaaccccggcttcccccaaggcatcagggagctatggggcattgcaagcatggtgcatgaggtgggcggatctcaggattctaaatagaatgatggggtgggggtagggcttctaggagtgaggcagaggaggtgggaagggcggtagctaccagcatggggcagtttcactgcgtcttatcctgtgggctatatactctgtccacaagatactctgtggtagggtaagcggtgcaactggcattgataggacgtctgttcacacctctttctcttcctgaaggagaggtacacagggcagtcatgaaaggatggcctagacacagttgtgtgtgtgtgtgtgtgttgctgtgtttatggtaaatgcatctatgttaccaatcatgagtgagcaactctcactctgctaacttgtgccataactgaatgtaagaaaaataagcctgtctttgggggacgtgcaggactgatgtggggaagccagaaaagccttacctctccaaatctggaggtgagggcgccatgagcagtccagccacctccatctctcctttgctcacctggcttggaaggacattcctttctcagaggccagtcagaaagccccacaggttgggtgtgggctgagatgccatggaccatcaggcttgctagagttttgtggtcctttctcagcagcttctcctggagagaagtgagcgtatgagttctgctttgtcactggcacttgtagcatgcaaatggtgtgaaagctgcctttgtgtgtgtgcacatgtgtaatattgtgtgtgtgcacatgtgtaacattgtatgtgtgtgactgtatactttttgtatgtgatgtgtgtacaatattttaggggagtgtgtgcgatggggtgcaagtgtacacatttgcacattgcctctaggtgtgcctgtgaacccatgtgcacactacctgtcttgttacacgtgtgcagaggcatgtgtgaggtgtctatttgtacattggtgcatatatgcaaacatgtgtctgtttgaaaatagaactaagagtgttcagatcctaatctatattttgggggcctttaggataatgaggctttatttatttatttattcattccgatagtgtctcattgagtagtcctggctgtcctgacactctgtagaccaggctggccttgagctaagagatctgcctgcttctccctcccaagagctggtactaaaggtgtgcgctactatgcctagctgcattttatacttataatttcaagaagtactaatattatatcacatgaaggtgaaggtctgggcactggacactgggcactgggcacagttctccttttgagccagtctgttgacaaacagttggttcccaggattttatgttcatggtgcctacttactgcgagtcttctgttttcttgccagctacacggttacttggagaatgaacctctcacgctacagctgttcattgggacggctgacgaccgcctgctgaggccccacgccttctaccaggtccaccggatcacggggaagactgtctccaccaccagccacgagatcatcctgtccaacaccaaagtcctggagatcccgttgcttccagaaaataacatgcgagccatgtaagccaagtgggggctgtgcccgaggggtgggctcctgctgctctgcccagcacccagtgcttagccccagctcctaggccccaggccctgtggctctctagagcctgaagaaactttacagatatttacgatgacagatttgcctctttctgggttctcaggtgctgtgtgttatggcaccaaaggtgtctcagtcacacagctgtaaacactgcccccagggcccaaattaagttcctaaacacaatgcctgtttacttctgaatgcagccccgttcattcaaggaatagttggaataaagtgaaaagatagggcgggcaacacctctggattgttttcactcagagctgactatgcacgcggctgacatggccagcatggtgcgcaaagcccctgtggcacacgattaacttagaaagggatttattagatgctgcctgcacatcacagaatatcgaggtcatcccgtgatttgagtgccctgtgttttgagtggagaagctgagaaaacacggatttccatacttcccatgggagacacattgtactggacccatggcgagcacagacagtagcacacataagcaggtctccaggcagaggatgaggcagccatgatgaaagcacacagacaaacgagacccagattagactggaaggcctgatgtcactctgcggtactctgtctctgaggtgactcgaagctgagagctgtttgcaggaggggctgtaagggagcctgggctatgcacgtaaagactgcagtacatgattgagtttgggggacaggtgaagtgcaggagatgaagttggtgcaggagatgaggttggtgcagggggctgtgccaagctgcaccttgtgtgtcctttggtaatttcttcgtaactttaagccttttaagtcaatgaccaaagggaaagcattctgcgtgtctcagcttctcaccagtctgagggactcgccctccagggctccattgcctgcccttgggttttcttcctcagctatataacccaactttcctaaggacaggatagaattagagaaaagctcttttattatatcaagattttttttttgtaatgtattgaaccttttaccagactatagatttgaatgaaattatgaagtaaaatgattgtgaaaccctggaagaaaagttttacaaatcataaaaggtattaaagtaaataagtgaataatttcggagccctgaaccacattggctggagagccgcaggacacacaggaggcacagccttgaaggctcttcctctctgagctgctctgacacatctctgcagggtccgagatgtctggtcccaggaggagactacagcctgcagggctactcagatgtgtgggtgctgtaatctttcccataggcatctctgcggggaggtggggctgggatgcccagcaggaaggctgagtctttagttctggtccagcagaccagctgggcagagagtcaagccatggtctttgtttcctgcagcatcgactgtgctgggatcctgaagctcagaaactctgatattgagctgaggaaaggggagacagacatcgggaggaagaacaccagggtgaggctggtcttccgagttcacatcccacagcccaatggccggacgctgtctctccaggtggcctcgaaccctatcgagtgttgtaagtagcagaccatgctgtaactgttgcacgaactgtcccctcgaaggtctgtttcagtaggcttcctggaagataggatccctctcaggagacctgacttccacgtctggctgcgttacgcattcccacacacagctgggtgctggttagaatctgaccaacgtacacagcactcgtggccttggcaactatattagtaaaacgcaaagcctgtcatgaagcagagttattctgactgtatctttatttattccctgcttattttgagggaaattgagaagaggaagtttggatttgcagccaccagactggacaaacccaaacaattcctcctctttatccttctcttccgattctcttttcccctcctcttctctcgttcctacccagttcctcttctcctttcccctctgctcttctccgcagctttatctcccatattctccttctcttttattatctatccctcctccccagtttgtgtgaatgtgtgtgcatatatgtgcacatgtggtgtgcatgtatgtgtgtgcatgcgttcaggtgtgtatgtgtgcacacatgtgtgcatgcatgtgtgtgtgtatgtgtgttgtatgtctgtacacggctacagatggaactcatccctatgcatgttaaacaaatgctctgccagagatccatatggcctgtatctgaattttgtaactcaccacgactgttcatcttccctgatggtgccaagttatgcctttaatgtgtgagatggcaacaggacatggctaagggttcctggtcctagaaagaagctggtatggatgaagctaccaccttcctctgtcctgcttagctggttccttgtcactagaaacatgtcaggggccatcctctcagccccctgcaccctgacgccctccccaatctggggactgcattcatgtggggtcatccagaccactgaggggacagacagtcttggctagcccttgctcctcatatcccagcactgtcaaactatgtcccttctccagctattgtggcttcatctcctaagagactctcaccatggggagatacactcactggggctttcagttccatgctgaactcctgagttctgcaggccactgtcaatgtcccctgggatgtgcagcaggtccccttgcatccactaactgatccttgcttcctctggaacaagctgagtcttagtcacacacacacacacacacacacacacacaccacacacacacaagcttgtggctctgccctctgtccctacctgtctcagtcccctggagacctgactttctgaggctgaatcctctcccctgccctggtttgtctggctggaaggagtctgaggaaactcatctgacacaggtgcccagaatgtcacccctgctcctagcctctgtagtcccccttgcaggaccacgctcatgaagttgctgataccctactgggtctctcccagctgcctgtcaagctttctgctttgcctctgcacccaggctcaatctgtcactgggactcttcctacccagctcttccaaggcccttcctgcccttccaggccaggagccagcattagaagtcagagttgcctattgctggcagcttctgaaaagagtgttccgttcttaacgtggaatcatgtcctgatgggtttgcctcaatcctgacacctacggtcactatggtttgagaccctctacaaagttcagggttggccagtccccagagaatccgaagagttatgtcaaatggcagcacccggggcccagcacctgagctgcaaggcatcctccaggccgcaaagacaaggtttcactcactcttgcctcctctgacacagcccagcggtcagcccaggagctgcccctcgtggagaagcagagcacagacagctacccagtcatcggcgggaagaagatggtgctgtctggccataactttctgcaagactccaaagtcattttcgtggagaaggctccaggtatgttcttcaggctggcccggatgaggtcctgtgctcagtgctggtgggagctggctcctggttggcaagatatggaccctccccctgcatgagtgcgtttggtcatagcatgggcaattgtctgatagaggtagccgtcagtccacaggggctctgaagagctcatgatctcatcccctttgagtttttgtattgctgaaagtcaggtcaaagttcagctttcgggtgcacagggccagacttttgaaagtgtgtgttaggaaagcctataggctggtgttggaaaactcctacttgctagagtcatctgctcacctggagtggtcatcaggcctggcacctgttttgagctctgcccagcccttcattctggcttttcctcttccccctccatgagggagagcactcccttggcttctccaagaagccagtcccttaaacaagtgccagctagtaccacagtggatataagtctggacctgttgaccttctgtattcacctcatgcgagtcactgggaccttcagtgtcacagccgtgtgtgtgtgtgtgtgtgtgtgtgtgtgtgtgtatgtgtgtgtgtgaaagagtgtgtgtatctgagtgtgtgactgtgtgtttgtattaatgtgtatgagtgtgtgtgagtatgtgagaatgtgtgtgtgtatgtatgtatgtatgtatgtgagtgtgtatgtgtgtgaatgtgcatgaatgtatgaatgtgtgtgtgtgtgtgtatgaatgactgtgtatgagtgtgtgtgaatgtatgtgtatgagtgtgtgtatatgtgtgtgtgtgagatctccatctccacagacacccccccataccccacaaagatctccatgagaagacagagcatggcactgccatgctcaactgtagcttcctgctcacagtagcccacaatgaaactgtctcatggtttgcagatgccaggggtgagcttagaagggccggtgtcctgaagagctgtacattttctttacacctacggccattgtgtctgcatgccattgggggccaggagtgtggccccaggtcacttcagttagacattggtcctggctgctcttcctttctggctccaacttggtagagctgtactgaccagagaggcttttgggctccagaacacagggaaggctgagcaacagccgcttcggtggctgtgggcaggcgtgcactgacccggaagatgcctgccctcagctgcagtaactcctctacaaagggtgtatggagtttggaattttggactcaggccttcttccagatggggatttttttggggggtgccataccctatccacaagggtattggggtagcatctactccaagctagtgagctggaggctttgcctgcttttcgttcttaccagctggccttttctcggaggtggtcagtccacacttagcctaatcattgcggagtgccgaggcattcagtggcctccatagtggggtcttgattttgtaccattcacaggaaacataagcacttcaatcaacacaggctttgacatttaactcggcctgcctccgtaatcatgcatgtaattggaaaatatgttgtaaattataaagaaagcccaactaagtgcagtgataaagagagcagtgcccacacccttctccggggaggtaaattctgaagtcatttgaccttctgagcctcaggcctgcctccctgtcagccaaggagcactagacataactaaggctccgcactctgcactgtaagatccctgtactccaatgagggagccccaggcaggatccagatagcttccctatctgtttatggtttgttcaagatgggaagacctacagaagtgcctgccccacaagggaattggccacagctgtaaacttggtagctcgcacctgccgcagctgggtctgagcctgggaacagtggcaaaatgcatcttccggactacggagtgagcagcccactgctgaccacaagcccctgccttactctgctggaagccccatcttgccttcattggattattcctaccataaagctaagctcctgaggctgcagaatgggtccctgacctacgttcacaggttacaagtgatgtctatacgtaaggcctgtaataaatgaataacagatagacagcactgagcgctttgaaatgtgagaactccacggttctgtgtctagacaacaatgtttcggggtgttttttttatatatacatataattagattatttgcatatgtgctcaggtgtgtgcatgcaaatgatatttttctgaaggaaggaaaccaatatctgcatgagtcttcctttgcctttggttttctaagcaaatatcgtccctgacctaccacactgtgtgagtcgggacgagctttttctagttgtttctttctggcaagccagaaagctcaatctgaattgcaagcacaaccggaccctcagtttctgatagcgtgcctggtccaagttccatttttaagctgttggttacagaagccaaacatttggatgagaggagaaacagatgtgtggaagctgtggtctgggcatgtggggctggcctttctggaaggggccatccctatggctctgactgttgtggacattgttgagtcaggcactcaggactagagccaggggtttggctccaatgtatcttccctgtgtaatgcagaatatctgagtcacaggtacactgtggaccatcatccagtgctccgggtcacaatgtgcaatgactcaaagggtcctctgcatctgttgtcaaagagtttccctgccaggagggctgtgggagtggttgccgctctgctagagtggcttgggtaggcacgggtagcagagccagaagttagctcctacactctacacactgcaccctgccatttcaccgagcagctgaggaaagtcactgcaatggcttgcagagctagctcctccctgggtcatcaactaatgatctccaggtgggggtgagggtggtgccacagggcatcaagcagcatggccctggcttatgcataatggtgaggttaggacttttctctggcctcttcctcctcctgtcaggagtatccattgaggactggctggaatgagactgtctttcaggggatgaaggtcaaaaagaagtgcagccctgagcatcagggaacactgactgataacagacatccttggagaatattttttccaggaagcagaggtagtcagtgaggtctgagggtactcgccacacagggccacacgtcccgtcagatgctctggcggcgttttggcctatccactccaagtgccgcaggcgtctggcatggaagatgacaggtcagctctccccaacacccccactccccacctcaagtatggcttcatcttcagctctgcaggctcgatggcgtgtttgtatgtgagtgagagcacgtcggtgtctgagcagtgggatcagttatcctcctgagctcagctccgtcttctttggagactgacccaaggtgaatgaagaatagaggacactggtttctaagggaacgcccagctctacatgttggcattgcaggtagctctgtttgaaagagtattgaggcctatttgggtgtctgttactgcagtgaagccaaaaccgaggtgccccaaaccccagtacggacaggtgacacccgaccctccttccttcatcttctacacttgctctgcagtcacaatgctctctggtgtcctgcgtcaagtctgccctcaaaacacagacctgctgtgctttgctacccacagatctgctttcctagctggcccttcctccctcccttcctcccttccctctccttgggaagggacacaggagtggatgggtgggtattggggcatacaagcagaaggtggcagagtttgtgaagcaaaggcgtcactgggcataggaaggcaagagtggccggtggatccctctgacctcaggcaggtgcatagatggagctctcacgcctttactctctgactttccttgtacttgaagagtggggcagattgaacactctcggaaatgggctgccatggcagcgagagagaaggtctcagggtcaaagggcagcctcagtcaggtctcagggcagaagagcagctgaggagcctcctgactatgaccgtgtgtagcaggaagtgctctctcaacctagctaaggggtcagggagacacctgtctgatatggagggtggggcacagacacttcattgtcggtgtgtctctggggacacagctggtcccagagcttgccagaggagaaggtgctaagctgtggaggagggacctctggacagcagaagacagcagggctgagagggttggggacctagactctacgtgcggcatgtactcggggtctccctaggctttcagcctgtttgttaattgttaggagtttcaagggacccctgcatggtagcacttgcccctgacaagagcatagcataggatagcatagcataggatagcatagcataggatagcatagcatagcatagcatagcatagcatagcatagcataggatagcatagcataggatagcatagcatagcatagcatagaatagcatagcatagcatagcatagcatagcatagcatagcatagcatagcatatccgggaaccctgggtctccagccaagtgcagtatagctgacaggtctttgctcatttctgcttttgttgtttgtttgttttattttgtttttgaagtgtgagcctattcatgagcacaggcttcagggcatactgtcccaggactaggaagcagtctacagagagatcaatagcttcaagcagcttgggtgggggcgcaggtggaggtattgtacagagttgtatccctgcatggggcatgtgtattgtgtgtgtgtgtgtgtgtgtgtgtgtgtgtctcagtgtgtttatgtataactgagcataggtgaatgtgtatgtatgtcaatgtgtcatgaggtatgcatctatcaatgtatgggcgcatgtgcctgtttgcatattaatatgtgcttatgtgatgtgaccaagtaatccactggccctttgtagaatgtccctgccccttgcagtgctgagcaggggcacctcaagtttcccgaaattccaccatgtggccgctacagttagagacaaccaactttacctcccgtggggacaggagtgagatccccacagtgtcctattggtggtcagtctcctgccttggataatctatgtgccttgggccatgtatacacagaagcatcttctcagctacgtcctcaagaacttgtgaagtccccagatgcagctgcctcaggctctataacccaacgtgtctcggggtcagctgtaggagcacacatgccctgaagtcacaaccagctgtaggaaaatgctttctttcaattccctggccatggtctggggtgggccagaaacggacagtgtctgctcccaggctctgtacgccatcagccctgcgcacacatgctagttttcatcacgggcataaaaataccaccgtgctgacctggtcaggcgaggttccatgtggctaccatgcaccctcactcagcaagatttggggagagcacacccttgaagttccacttacagacgtgcccagctctgcatggttcagaaatcactgacccagtgagagacataagctggggaccggacccataatcccttttgcagaaggcatttcttcaagtcttagaaggaaataaatttggaaaggcagtgagagacccaccctgggcattcagaaagtagacttggcctgaaggcctgcaaggtaggagaggcctgcctcggatccgggtgctggcaggctgagtcttgctgtgagcttcacgagcagctaaactcaccatctcaagatggaagccacacagggtccctacaaaggagcagctggtccttgccagtctggttcctcttcttcctagagtgtctcaggatgacattcgacagtcgcagtcacaatcccttggatggcacctttctgcctatttcctgaagtgtattcacagatttctcacagggtgcagttctagcggctttgcgactgtttggtctgtgcccaggatactttgatctccatgaaagaagtcccttttccacaagcactggcacagtgaaggtgtggctgggtgtggccctgaggttccagtactggaagtactcatcagagtggccatgtgggagatgctggggctttctgggtggagtctagggagaagggtgaggtaggtgtgtgtatgtgtgtgtgtgtgtgtgtgtgtgtgtgtgtgtgtgtgtgtgtgtgtgagagagagagagagagagagggggggggtgaggagggaaggaaaggggggcaggtcactctgcaagagaccagagtgctccttagctgagcgacctgttgtgaagggcaagcctggccctccgccctctggcatcctgcctaacggtggaggcttttccacatactcctaccacacggtgccattgctaccaagcccccctcctccccagggacagagtggttgctgaatcatgccctgcttcgggcattctattttagccacaaagagcaagagaagccgtcagctcttcccttcctcacccagatgcccactgtcgcctctccgaaccttgtggatttccctccttgggatactatttgtcggtagaggcagacagtgtctgtgctttgctctctggtgcctttcacaaaatggcattttaatccctgttagtcgatgccagtgctgttcatttctgtgactgaccagtacccccatgtggccagggcagatgggcatgggttgttctgttctctgtgactatcatgaatgaaggtgttgtggatgttcatagacaaggttctatgcatgcccgtgtcttcctcctggcacgtccctggctgtgaatctgtcctcagctatgcagtgccaccaggctgtttcccaaaatgctgggggtatggatggcggggggggggtcttgttttaccttggggttcttctgaggggtgcaaagctgccctcctaacctgggagaagcaggcctccagggcaccacatgcacaccaggctggcgaccctcagagcccctctgcagtccagccctgcagagcctgtgttcatctagccccgtaacacagccatcccagtgcctcacactgatggggtgtctggacctgcccctcccttgaggctgatgggatgcagactcagggctagaaggaggaagcctcctgctccacccctaggagggggcgaagcacatctcagaggcttctccactcctgaataaactccagctgcttccacgtgtggaaacagtggctcagcccctaccctggcgtgtgactggcctgtgggcctgtggtggcagcggcgtcctgcagccagtggagcggcttcagacctgcaggctggctgtgtggaaaccttgggcgggtgtggtggggaagcctttctgatgactcacactgcagggaattccctaatgatttggaatatttttacttctgaactggagcacagtttcctactgggagcgtagggagctcctgataagatgggacacaaaggcccttttaggatggccggctggctccctgcctgggagaggctgagttctgaacagcacttggttaactggcctctgagcagggaggaggggggtctgaactgaggagtctgtggacgcatccaatggtctagggcccccctcatggccgatacctgatgattccctcaggagtatgaaggactatctccacgtaatttgccccccaccaccccatcccccgtctcctgccagaagcaacctgctaggtgtacagtcagaagtccattcagccaccgtcagagcgagaagagtgcagcagagtcactgtttcgtctatttgacaactgcagctggaggacctgggtctggatgggaccagtgctttgaatgcctggcctgggataagcacagaccttggagaccccaagggaccatattttcaatgggaaacagaagccgatgggtgatctgtcttggtgcaatttagaagacaggaatggagttctgtcttgtctggtagtggttggcatgggaatgctggattggagctggccagtcttggcttggtaaggcacagtggccccttctcagccactctgctgggacaggggaacaatccgtcacaggcagcaccttctccccatggttctgagccttggcaggaacttttgggatgacgggggccacactacagttggcacacctatgtacaggcaaagaaactgtagattctcagggacgagaggcagagagctgcctctcccttgtggagggcaaatctaacacagcatgcagcctgactacagacccagagcacggttaaagaaccgcatgtgggtacttccagtttgacccttgtggctataggtggcccatgtggctgaggttgagggtgcttctcggctgtcatccctgagctaccagagcctaggggttcactgtttctgacattccggtgctctaggggtatcttgttgttttccctgaggggtaaggataggaatgcagttagacccccttcatgggctcacctgatggcatttgctcaaggcctggggtatctggggagctggtgtggcctggtgaggctaggtggctcttggagcctctggtgactcacatttccaccccgtgcctccaccctccgcccaccaccctgtccagtgctgagggaaggagctggtgtttgatttatcagtaatgtagggttagtgacagacaaatggggtgtaagcagaaactgagcgtgtgcctaaagcggctcatctcaggaactgacttcattttggaggagataaaggccaggatggatagccgtcaactcagtggccacccagttgtccccaggtcatgagcctgtcaccaggactggggactcagagcctgtgagtggcagacacccttcctctaatcactaggtccacacctcatcgccagctgagaacaatacgttctttcactgtgcctatgagagccttttaatatttttttttaacatgcaaacagccactgggctaaggttaaaaataccacgtgttttgcatttctaggtcctgatgtggcatgaaatagccaaagaaaggcttctcttatctcctcggtgcttcctctgggcagaggctgggactttgccctggcttcccccaaaacacataggaggctggtgcgacttaccaagtggcagagccaggctgcgctcaaagcacagtacatgttgtgcattgctgggttatattttgggggtgcatgttgtggattgttgtttttagggggtggggtcgccctgcctctctctgcttttctgtcccttgggagagactaaggtgtaggaaaccttccctgatgtgtgttgtggcagacaagatgaatataaacctggacacagggtggaccattagaaacactcttgattatgtgggcccctcctaagaatatacactgggcatcgtctttgaactcaccaagtacacagggccagtactctagagcaggtcagcacatgccatccagtgtaggcggaatatctaggggacacagagcactgccctatgacctcaccgtttcttcccactctcccctccatgacccttgatttctgggtcacctggaacattttaaagatatactatcccccaaacagagtgacagatttcttcctgccctttgttccagatggccaccacgtctgggagatggaagcaaagactgaccgggacctgtgcaagccagtaagtacttagaatcctgcagcagggacgagggaaccagacgggggctcctgtttgttaaaataaaacagtgcttaaaaaaaaaaaaaagacagaggcattgcccaaatcccttggccaaatgagagccactagaatagaatggaggcagtaaggaggggcaggaggagagaggctggagagagcttgaggcctctttattctgggtgtgctttgctttttaaaggttccaggttctgtctcctctcactaatggtgtagccccaattgagtggctaccccccgggagatcttggtgttctaagcctcattcatgggcacccagcacctgcctggacatgccacccagcctgtgtgacttgccaccaccctctccagagaacgcctcagctacctcgcgctcttgttttgaacttggcgtggacgaaagggctgaccgaactggatagcttagctcagctggttgggtttgctgaggagcggtggtgaatgtgtgacatcgtctgtgggtgacataattagtctgtctccctcccgcgtacatacgcacctgctcgtgttccctcttcaccatcatgtgaggtcattattggttgtgattggctgatcttgtctcatatacttgtgctggctatgtctgcggctgtgacatgtttctgactgttggtgtggtcttgtcatctaaagtggctgctattggagacctcgtggagtcagggtcctctttgctgactgcagtctgtcttcgccatccctacggtttcctcccttgcttgctcggcttttgcagtactggaagttgaactaaggaccacgcataccaggcaaatgctctaccattgagctataatccctacctcaacagtgtcttttaattggacattaagctgtggatggctaaacaaattagagtactgtcgctgagtcctgtgcgaattcagtctagtctcagaagagcataacaaaatgcagtgagtaggtttttgaagacacccaaaccctccctaactctgtagctcattgcacagacttcgtcacaatagtctgggcagcgtgcttgtgaccacagggcatgaggagcctttggtgcgctcccagtgtatggaagtgggatttaaatgaatgagagagctttttttggttttgttttgttgtgttgtgttgttttgcttgtttgtttgttttggtttttcgagacagggtttctctgtatagccatggctgtcctggaactcactctgtagaccaggctggcctcgaactcagaaatctgcctgcctctgccttgggcatatgagaaaaggactttttctatgaacactgggcaggcagcaagaatcacataaatggggcatgctggtaatggggtccacagagtggacaggcagtcatggctcccgtcagcagagcagtcaccagggtgtctgcttcagttgcagcaggcacaggctgcctccttgtcttctagctgagtcaatgaggatgggggaaaagaaatcctttcctgcttaggttcctctcaggcactgagccactctcaagaaacctttccaagtacttctcagaggaaaggtcctctctggccagtgatactgttcatgtagatgaaatcttaaacattcactcacagtacccggctccctccctcccactgaagagatccttctctgcctcagtcttgtctcttgacttcatccaagttgtccttaaggaaatattgaaggcagtggcacatacacatgtacatgcgcacgcgcacgcacacacacacacacacacacacacacacacacggaaacatacctgcacacacattgcatttatagatattttaaagatgggtttctgctctgtatgtggttatgcatcgcccccactcaagacggtgggtttcctcaggcctgtgctggctgcagcctttacagtctctgacaacactgagaaactcccaacacttgatctcagggcccacttcctccagcttccttcctggttttgagagcagagctcctggggaaggaagaggcaagcttgtaataggatctgtctgtgcatagtgttgaagtgcgttgacttgtgtccgtatcaagatgtgaccctctttggtcatttgggataagcaaacaagccagggatagcctatccctttggtcctttctgcgttccttccacggacctcagatatagagaccaccatggggtagcctctttcccttcacctgactgaactccaacgtcacagccaggccacttaaagctgggcacaacccaggcctgagtggccacagtttggggctgcttcctgcaaaggtgggcatgtagcataggcaccctttacccgcccctcccccacccatctcttccaaaggaagtgaaggtagatgacacagcttcctcaggttgatggagcccaaggggatggagcccagaggggaccctagccagtcctgccctggggctggcatccaagggctgtcagtgccaggttctctctctgataaaaagaggctggggctgaagttcttctggtttctgtttctaacgctgaggttttattattaacataactcaataaagtttgctgccatcgatttactaccattataacaagctacgtatggttaattactttaacaaaagaaatggtaccatggatttttctgacacatttcccctggcctgttagactaaaaccacacgaggaaagaaacggaatgaagaaacttatggatctgaaatccccagcagaaatcaggtgtagcactcagaagtactgacctccctccctccctccaggcagctgcaccatggggcccggcacccccaggactatctccccccccaacttgggtgttcccactcagttccaagtattcatggcttgcattcttgtttgcccttgaaagaacgtgtaacaaacaaaacaaaaaaagaaaaaaaaacttgcatatttctgtttaaaaacaggaaagaaaacagcagccacctcggtgttctcaactgttccaaggccctgggctgagctctgctctgccttcattatgaggaaattaaggattctgatggaactccgtgaccattgtcacagtgccactctggacaatgtccataaggaattccaccatgtgtaaccacaaagtgcctgctataagtaggcagaatgcagccttttgtctaaaggtcactgggccttagatactggggcaggagtaggccttgaagtcagctgtaccagtagcatcgaggcagctctgctctctgagagatgcccataagggtgtctcttcttgcattagttcaaccacaagggtctcccagcctctagctatgtgagaaatgagggtgccgcttccctgaggagccggtgcacgctacctccggccaattcacaatcaaaacacgtgagtaggtcacacacaagagtcaccatcagaggccctctcagtggccatagacagccgtttgagtggacagtgatgtctggacaaagcgttcctggtctgtaaggtcctgactgttccctctttgctgttttaccaccagaattccctggtggttgagataccacctttccgcaaccagaggataaccagccccgtccaagtcagtttctatgtctgcaacgggaaacggaagagaagccagtaccagcgtttcacgtaccttcctgccaatggtaactctgtctttctaaccttaagctctgagagtgagctgagaggaggtttttactgagcagccccccgaggctataagaggatgttgttgtaaacaaaacaaaacaaaacaaaacatacctgtagcctcttcacaccacgtgatagccctattcacaagaccaagtcgcccaccccctcaaagaaaagcgaagcctgggtgtgttttcctgtgactggtgcatgctggggtcatcacttgctcgccttttgcaaatacagcagcgcggccaaccaagcagctctgctgcgctcaggggctgatgcggtctgggggtgtatatctaacctctgtgagtctttgggttagaagaaagtatttgtcaacgcagttttgtaagtagcttcgaaaataagcctgccgtggtcactggggaacatacatgatgttgtcctcatggtgacgcttctacacagcgtgcggtgtgtctccactgaataatgctgtcccctggtgacgtgagactttcagatggaagctcttctgctcgagtttactcatttagggaatggcttctttcattcagaagtgatcggctcgccttttcaactttctagggtgttttatttacgaaaataccgtttttaactgctccccaccccgaaagcttctagaaaggtgtgtcccaggcgtccagggtttcctgtgtggtgcaggccattctcctgcagcaggatgtataaacagagagcagagtcggttgttatcctgagttctattgtattttgagtaagctaggctatgtcaacaacctttttaaattgctactttttttttcctctaaaaacttaagatagtcatgtaatttaagagggaagttatacaataaatactagccatgaaagcagccatattgctatcttagtaaaatcaaggtggttttgttgttgttgttttgttttgttttttgttttttaaggtttcaaggttttttgtttttgaagtgtaaaggcatttggaacagtttagacagtacgaaaagttggtattaaaattctgaaaccaattgtcttatcaggaaacccctagaaatgccctttaaaaatgaggacaatagctttgttgcattctcaaacaaggacatcagtgaaagggcagcaactgtctgtgctgtgggtgaccccagaacagcggcccatcccccatcccgtctctgctcttcagattatttcacaggcctcttcctttcgggaaataatgcacactctctcttacaaaaaaaccaaacatttggtcttttattttattttattttattttttgaaagtgcaatgattgtgtcctacctatacttcaagcatggttgatctaagatttttgaaaggtctaaacgttataaagaaaaaaaaacattttctaaaacaatgtggaagcatcgtaaagattaacttccccttgttcaatgcacatttgagtccgtgatgaaggtttcatagggtgctcagtattcgtaaagagcaccgtgtcagaggggtctgcggagcaggcgtcccgtgaggccccaggctctggtggctgagtgtacctctgcctcccatgctgccctcccttggtgatgcagtatccaagcatgccagcggctccacagtcatttgctctgcaccagtctgcctcccacagtccacatagcctcctgctggaaactcccagctgcaaaccatccttatgtggctcaggtcttccttcctcggcccttctggcttcacccatttgctccagacccctcttcagccctttcatcctgcttccctgactctcgtccccccaactccaagatggctgcccaccaccattgtggtctcggggaccaaccgtatttccacaccattagactgtgagctccttcagagagaccttggccacagtagggttgaatgctagcattactcattgcctgattcctggctggctaccgacatgtgttgttgttgttgttgtttaaataaataaacacacagatggagaaccccagctcctgtgttccgtgttctgtctggtgctccccttccgtgctccgtggcatctgttgctctggggtgtatctctgagaacaccgatgctaatgaatggatgcctgtgttcatagctcccctggtctcagattgctgcatttgaatcctagaaactctccagggcacatgagtggctcttaattaacctgactccatgatccttcagtttttctccttggacactggctgtgaagttccgagcctccccttgagcctttctgtattattaagtgagtttcatgtatactagtatttcacgtatctgtgaccaatacggacacaggttcttatggtcatcaaatatgctgtgtttgagaaagtaggaataaatccttttaaaccctccctgtgaaattcatttttatctgtagatatacaaaatcgagactcatttagttttccttcagacttaggtgtgaggatgtctcaagggcgctgcatcagattcctcctctcccttacccttgtgaaagggcccccactcttgcacaaaaccgccccttgtcccaggccctttgagattcagggggttggaagtcaaagtgtccaaggtattttgctgagtataaggcagggggatgccagctttgtgcgttcctttgtcaccttcgctgtctcctgatacctctacagcagattagctcacctggttgacacccacccggggccatcctcctttcttattctcagttaactgtgacagcaatcaggtggcaagaaaatagagcaagtgactgggacccttgggttctgggtggggtggggggggtactgaagtctttggtgtgtggtctgtgatgaccctggaagggtagcttggcctccttccctcctactcgtgtgtgcctaacagggaaagtctccacttaaaggaaactcctgggcttcccgagactcttgtctgccactaacttagctttactccctgaaaggagactgtactatcttcttcactgagctgtgggggctgggcagcacaccttaaagccagtgcttctgtacagtgaggggacaagtcaccgtaacctatacgattctgagagcctgtcactttgtctgaaactgtttagctagctagttaggagtcccccggccttcccagccaggacaggactgtgaaggtgggagtgactcttgtccagagaccaggaacacgtactcccgagcagatcttgcacaactcattggaaaccctacagcgggctctgcaggtctctgggatagtcatcagacacagatgctaaaagcacctgccgactgagaagagacttcagagtgcccagtcccagccagggagggcctcccgggcttcctgagactctcacttgacactaactttgctttactccctaataagagactgtaatatcttcttcactgagctgtgggggctggggtggacatggtcataagaagagggctatgccaggaatgtctgggtctgagcccttattccaacatgtcaattataattccagaacgatgaatggatatagaatgtctccggtttgggttccaagatgagcatctctgccagtctgagacctcagactagctctttcttccagtcactcgtggcaggaactggtacctgctcacaggtgcaggggtgcttataaaaagaagagtcagcttattataacagcacaccctaaagtcagtgtttctgtacaatgaggaaacaagtctccacaaactataggattctgagagcctgtcacttcgtctgaaactgttttagctggttaggagtcccctggacttcccatccaggacaggactgtgagtccaggaacacctactcccatccctgacccaacccctagcactgggcactcgtgtgagaacagagactgacctggtgacagagaccagtacatgactataggacaggaaaagcattgcagtggaaccaatgtcagtcaagcaaccccctgagcacacaagacctataaggataggttgccccaagggccagaagtctatgaacctctaacacccctccccctcccacacacaggcacacttctttgcatggactctggggtggagccatgagtgatctggagaataaaataccataaggaactttcttgagcccttcctgattattattagtaagtacgtctaagatatatttccatctcagaggaataagaggaacgcaccacttctgccggattcttggttgtatcaccagagtccggaatcttagagactcgtgtagacttcagcagacgacctgggtcctgcctagaagcagagcccccaccttataatggatccctgtgcctcatgggctctgtagcttagtcactgccctgactacaactctactgaagatatcaggcctcaacttgtaactgcctgggtacagagaccgtgatggcatggcagtactgtgcacagcccatggctgtctgcctgggcacccacttcctgtcctatgagaagcctggccctggagagagaggctaaggtctgccctactccaagggtttcttatggagaaaccatacaacatagtggcttgttgggattaaagccaggacagtttcttccacttaccatcattcagcttgagcctttccttccttaaagagcccatgaaggcttcaaatggcagagaacacaatgtggtgtgtaacggggcaaagtgatgttaattctagggaccctgcttcttgattttcttcttaaaagctagtgaagaccttgcggagtgaggagaggtcagggtgggccaaggagcgctgtctctggcgcctaaagctacaggtggtacctaccttcaactgccaatgacctcagcaaccaactggccattgtagctgtgtgccttcatgttcaaatgacaccggtcagtagacatttgggagaatggccaagggctgtctagacctctggatcaaggagtcctggctacttaaactctcaaatctatctccagggaggagggagtctgtttctcataccgacactgatgtgccgaagagaaggagctaacacttgcacccaggccagccctgctgcaccacgaggaaggttaggcatcagaagaggccatttctgcactatgtgatctctcaggtcttcccatgtgttagaaggcctcaaactgaagtgaacacttgtctgggtgctaatgtgacagctccaagagatgcaggcctctcaagcctaagctgtgtccatgtgcgtgcacacaccttgtgcttctgtggactctccattttcacacagggaaggagatgaagggtagaaggttgcctggagataattgagacagagagagcaaaccatgtggcacctggagtgcccgcagaggatggctgtgactgggacatttgaggaaccatggaatagaaaacctgcaatttacaagggcccgagagggaggccaatgtcttgtggagcgatcacagaacacaataggccattaggatgaagggcaggaaggtagttttgtttagaaatctaagggccatgtgccaccaaaaacaaacaaaagcgtgagtcagagtgagctgaacacccaaggaggctgagcacggaggagacatgcatgggcgggagggagagcagatagctccgcctgtgatctgcccatagaattcatgccatatgtttgccacctgtgaggtactctcaggtccctggctgccccacccagctctgtcctaggcagtatggcagccccagagccccagctgctggagggggagttactgtcaaagcatagagattggcttcagcagctagtggatagaacgccactgatgtgtgttttctgtgtgtatggccttctgtgccatccaccgccatcaaaagtaaatggtgtttatcattctgcacctggatgggtctcagccggttggtttgggctgtggactagcgtgcacaggcagcaaagccattctcttccttctctgggtcggggcctgctctgtagctgggagttaggaccttgtggcacgactgacctctgtgctcactttgatacctctggaaagggcatattcccagctctcacctgctcaccacagatgaaaaggcctagcgaggtcctgtaagaaaggccggagccaacaagtccttggtgtgtgctgtttccagtccccggcgggctgagcttccgcctcacccttcaggatttcgtattctgcctgaatgtacctccacggatcctcccgctgcactgaacacatccctctgtagatgctccaggtctaagctgtccaggagacaacccttacgctctctcatccccagggagctgggaaccacacatctgcaccgccattgtgaatgctgaatggcagatgtgcccttccattcacaggctcacaggtcctgtaggatctgaggtcgcttggcaggaagatgtgtgaagcctttctggcctgggcttgagtggctctctgtgctcttcacccctggaatcctctcttgcccctgacttactgctggctgtctatgttgatcaggagacttaggcttcaatgtcactgccatgaagacaatctgacttttgtttcataggagttttagactttgaacaaaacctcttctgtccggcactggaaacagctggtaaaataattcaagccacgacacttgagtttacttgaaaatgcaagtgtgaagtaacagggcatggacagaagacatcctcacttgtactgagcatacgtcctgtgaaggctgtgggaaggggacaagtgcccgcctctgcctgacagctctcactgtgcacaagaaaggggactgataaaggtgcttcccacctgctccactagaaggacaagatagatgccatcagctggctacacatcagtcaccagcaaccctaatggtgaccttaaagacccatctccagttgtcttgttggggattggtacttcaacatgagttctgcggcatccaggttctcccacattctccatatgcacagcgtagagggtatggtacaggctgtcattgatggactcgcagaggtctgataaagcaggctgtatcctcacagctctgcctcagaatcttcacacaggtcccactgactcatagctggcaaagcctaggctgtaggaatgaattaacccagtggtcacacgttagtcatacaggctctgccatgtgtcatgtgtgatgatgccgtgtctgttggtaatgcatctgagtgagggctgcccactcagcatacaggagcactcttcacacttaggactgagctgggcaagaacacttagacagaaacccaacataagtaccatctacacaaccgtgtggtctctcttcatgcagccacactgccttcgtgtgtcagatgctgggcagtcctcggagcaaggggattggaggcacaggtgtcagatgtcggtgaaacttgcctggcaaggttgctcaactgtttatatatttttagcaagttgtcataactccccccaaataagatggttggatgtccgaggtgctgatagctgctgggaccttgagctgatgccccagaatgctgcatttacaatgggaaccatgcggtccgtctgcacaaaggtccatgggatgtttgactgatcccaggcaaagaaggacagggcctgtctgcatggctctggtccacagtagacacattcaggctccctcaagcacaggcacatggcccgtgtatcatcaggctcattttgtgggcctcacaagatagccacattactccaggagagagtcaccttcttccacttgccccacttaaaggaaggtcattctccacccattccctgtcctggcagtcaaacctaggctgtcctgcaccctaggcaagcactcttaagcactaagccatattccagcctagctagaagttatagaagccagagtgagtctctgtggctgagccttactagacttcgccagaagatgtgcactgttagtctgaatgggatctgtccttgcctatctttcttatctaggagatcagacttaagattcaaagccaaactatgaatcaagagcttccatcttttcctgggtcctagtgaggaccctctggctgctcctctctaatccacccaatgagagttggtgaaacatacacccaaattcctggataggatggaggtggcgcgagtcagctgtctaccagcaagcttggatgcagggcagcagaggcagctggggtagctatacagaacaaactacttctagactcatactgttgatggcttcagaagggcctgtgacagacagagaacagtggaattcccccaggatccttctgtgtgcataaacttatagcccagccccagtacagcctcagcacagacttaatccttagccacacactggagagggcctcaaatcagaaccacagagaccctggctctcacctggaccttgtgcacagcaggcagcctttggagagtgcctataagccattttagaagtatagtttcccagaaagagcttcccacctaacctggaaggacaagccccagagatggaactctgtgaggcccaggagaggagcgtcagccaagcacaacctgcccagtggctcacagatgaatggcctcattgggaggcatcctcacctggtgttggcatgtaggaacagaagactatttgctaggcttaagtctcaagtctagagtcaaggaatgctctttaaggctccttggcccatagactatcattgcaggacctgcaggagatgggacggagaaggagccttcccccatcacacaaccgagcatgtgccattgacggtgtcagccacacttggctggagaaatcctggaggacagtgagccccaacctgggacacaaactttgaggcgactccaggtcaaatccctcagccgtccttagactcttcgaggagtgggctcaccacaccagcacttgtatgtgatccctgcaaggcgctgccgtgtacaaggttgctggactacggtgactgctgtggctgtcaggtgcacacagtgccgggcatgcacgatgacacacatctcccatggccgcacagacccagcattgtgctgtgctgggtgtgaggatcagtcacagcaggagccagcagcccaccttcttcatgagggcttgctttgtctctgacagctggcccaaaagattgccgttaatccttcatgtgctcgctttccataataaactctgtataataaactcacgactgggctcatgtgctgttttcaatgtgctagcattgcggtgagctctgnnnnnnnnnnnnnnnnnnnncccagtctagcacggagacattgcgtcacaccccctgcctccctctggcgcaggagacagaccagcgcctggggcttctgtggagcccaggtcccatttcctgactaataggaaacaagaggccccatcctacaaggctctcagctccacatgagaaatgcagacacaggcagtcttgagttgtatagccctagggtttctgtagacagacactgtgaggggtggcatatagcttcagctgaggagacacttacagggaacctcagagaagggccatcagaatccgattcttggatcactcctcctctgccagatggacaagctgctctgtctccaagcgttcctcagctgtgctgagtgaccatccagtgatcaggggcctctgtctttgagtggaactgcctccgtcaggggtggaatccacatcaagtgtgagactgtgacagggtcccctgcacaggaagcagaggcttgccaccttggagtcatcaggtggcaggagacataccctgtgtcttctttccctttgcgctgacctgtgtgacactgccccctcccaagcactgagctctgaaggtgagggacctgagcataagatagtgacattgggctggcaatgtttaagtctccgtccccatctatccaatcaaacaggcttcctccccaagagtggcagcgtggtatccttgagtggagctgctgcctcagtctcagataaccagacagaaggagccagaggatggagtggaaagggctagccaggacacaacagaggctgcgcagggtctgccccaaaccccaatcctggttcattttgtacctcctgagaaagaaacttggaagtccaacttagaccatcaggactcatgccctcgtgaatgtgcagaacttcaatgcactcagctggcccaggtgaccattcaaatgccaggaagagtctgaggtggttagcaagatgggccggggtactttaaacaggtcctaacaacagaatctacagggttccccagagcagccaccacacccactccctgtctggcctctggattgctggcccaggtccaaccaacgctccaagtccctgtccctgtgtggcaggtaaattacattctctgtcatttactgggcagctgtgtttgggactgtgcctttcatgtcatgctgggtagttagggctgggttttacagatcttataggctgcatcgtgggagggttgcgttggccttgggacctggctggggacccagagcagctcagcctggaaataattcaccttccagtcatggacctttttttttttttttttttaatcacaagctctgaaaatgaccactctcatttagaactgaaccttcacacacagatcctggctttgagcagagcgactcatacccaggattcttctcggtgtagttttgttcttagcaacattgctgcctatgtctttctggtcaggcctgtgatcccagaaactggctggacacggttctgccccaggtgcctctcagggtctgacttctaccgggttcttgccaattctggatttacagtgtggttgagccagctggactgatactggatgggggtcgtttctgaagcatggcttacccccacagagccgtctagacgggctcgtgcctggagctgagttagtacctgtataacacatttcattgtaagctgtagaacccagatggccaggggcttcctgttcctcgcagctcctgggagatacagccctcaggaagggcgggacccagagctgatctcatatattcaactttctaatgtcagagggatgggtttcccttccttccgtttttgttaaatgccaggatgtccacagtccttctcattattagcagagcatcccgtcccacaaagcgatctggggacctgcccagagaggagcctgctacctgcctgcacctatgattcccacggcttaggcaacaggacagatagggtggttggtgaactgaactaggtcttcactgggaggcttttctcagaggcgccgtgtgcatggcgtacttgccttggggctcctattcctccttgtttc

SEQ ID NO: 224 - DNA, 3435 bp, Mus musculus
ggcccgacatgacggggctggagcaggacccggagttcgacttcgatttcctcttcgagttcgatcagagcggcgggggcgccgcggccgcagaacactacagttatgtgtcccctagtgtcacctcgaccctgccccttcccacagcacactctgccttgccagcagcatgccacgacctccagacgtccaccccgggtatctcagctgttccttcagccaatcatccccccagttacggaggggctgtggacagcgggccttcgggatacttcctgtcctctggcaacaccagacccaacggggccccgactctggagagtccgagaatcgagatcacctcctacctgggcctacaccatggcagcggccagtttttccacgacgtggaggtggaagacgtacttcctagctgcaagcgctcaccgtctacagcaaccctgcacctgcccagcctggaagcctacagagacccctcctgcctgagcccagccagcagtctctcctccagaagctgtaactctgaggcctcctcctacgagtccaactactcctacccatacgcgtccccccagacctctccgtggcagtcaccctgcgtgtctcccaagaccacggacccggaggagggttttccccgaagcctgggtgcctgccacctgctaggatcgcccaggcactccccatccacctctcctcgggcaagcatcacggaggagagctggctcggtgcccgcggctcccggcccacgtccccctgcaacaagcgcaagtacagtctcaatggccggcagccctcctgctcaccccaccactcacccacaccatccccccatggctcccctcgggtcagtgtgaccgaagatacctggctcggtaacaccacccagtataccagctctgccattgtggcagccatcaacgccctgaccaccgatagcactctggacctgggtgatggggtccctatcaagtctcgaaagacagcactggagcatgcgccctctgtggccctcaaagtagagccagctggggaagacctgggcaccactccacccacttctgacttcccacccgaggagtacaccttccagcaccttcggaagggtgccttttgcgagcagtatctgtcggtgccacaggcctcgtatcagtgggcgaagcccaagtctctttccccgacatcatatatgagcccatccttgcctgcccttgactggcagctcccgtcacattctggtccatacgagcttcggatcgaggtgcagcccaagtctcaccacagggctcactatgagacggaaggcagccggggggctgtgaaggcttcagctggaggacaccccattgtgcagctacacggttacttggagaatgaacctctcacgctacagctgttcattgggacggctgacgaccgcctgctgaggccccacgccttctaccaggtccaccggatcacggggaagactgtctccaccaccagccacgagatcatcctgtccaacaccaaagtcctggagatcccgttgcttccagaaaataacatgcgagccatcatcgactgtgctgggatcctgaagctcagaaactctgatattgagctgaggaaaggggagacagacatcgggaggaagaacaccagggtgaggctggtcttccgagttcacatcccacagcccaatggccggacgctgtctctccaggtggcctcgaaccctatcgagtgttcccagcggtcagcccaggagctgcccctcgtggagaagcagagcacagacagctacccagtcatcggcgggaagaagatggtgctgtctggccataactttctgcaagactccaaagtcattttcgtggagaaggctccagatggccaccacgtctgggagatggaagcaaagactgaccgggacctgtgcaagccaaattccctggtggttgagataccacctttccgcaaccagaggataaccagccccgcccaagtcagtttctatgtctgcaacgggaaacggaagagaagccagtaccagcgtttcacgtaccttcctgccaatggtaactctgtctttctaaccttaagctctgagagtgagctgagaggaggtttttactgagcagccccccgaggctataagaggatgttgttgtaaacaaaacaaaacaaaacaaaacatacctgtagcctcttcacaccacgtgatagccctattcacaagaccaagtcgcccaccccctcaaagaaaagcgaagcctgggtgtgttttcctgtgactggtgcatgctggggtcatcacttgctcgccttttgcaaatacagcagcgcggccaaccaagcagctctgctgcgctcaggggctgatgcggtctgggggtgtatatctaacctctgtgagtctttgggttagaagaaagtatttgtcaacgcagttttgtaagtagcttcgaaaataagcctgccgtggtcactggggaacatacatgatgttgtcctcatggtgacgcttctacacagcgtgcggtgtgtctccactgaataatgctgtcccctggtgacgtgagactttcagatggaagctcttctgctcgagtttactcatttagggaatggcttctttcattcagaagtgatcggctcgccttttcaactttctagggtgttttatttacgaaaataccgtttttaactgctccccgccccgcaagcttctagaaaggtgtgtcccaggcgtccagggtttcctgtgtggtgcaggccattctcctgcagcaggatgtataaacagagagcagagtcggttgttatcctgagttctattgtattttgagtaagctaggctatgtcaacaacctttttaaattgctacttttttttttcctctaaaaacttaagatagtcatgtaatttaagagggaagttatacaataaatactagccatgaaagcagccatattgctatcttagtaaaatcaaggtggttttgttgttgttattttgttttgttttttgttttttaaggtttcaaggttttttgtttttgaagtgtaaaggcatttggaacagtttagacagtacgaaaagttggtattaaaattctgaaaccaattgtcttatcaggaaacccctagaaatgccctttaaaaatgaggacaatagctttgttgcattctcaaacaaggacatcagtgaaagggcagcaactgtctgtgctgtgggtgaccccagaacagcggcccatcccccatcccgtctctgctcttcagattatttcacaggcctcttcctttcgggaaataatgcacactctctcttacaaaaaaaccaaacatttggtcttttattttattttattttattttttgaaagtgcaatgattgtgtcctacctatacttcaagcatggttgatctaagatttttgaaaggtctaaac

SEQ ID NO: 225 - DNA, 2112 bp, Mus musculus
atgacggggctggagcaggacccggagttcgacttcgatttcctcttcgagttcgatcagagcggcgggggcgccgcggccgcagaacactacagttatgtgtcccctagtgtcacctcgaccctgccccttcccacagcacactctgccttgccagcagcatgccacgacctccagacgtccaccccgggtatctcagctgttccttcagccaatcatccccccagttacggaggggctgtggacagcgggccttcgggatacttcctgtcctctggcaacaccagacccaacggggccccgactctggagagtccgagaatcgagatcacctcctacctgggcctacaccatggcagcggccagtttttccacgacgtggaggtggaagacgtacttcctagctgcaagcgctcaccgtctacagcaaccctgcacctgcccagcctggaagcctacagagacccctcctgcctgagcccagccagcagtctctcctccagaagctgtaactctgaggcctcctcctacgagtccaactactcctacccatacgcgtccccccagacctctccgtggcagtcaccctgcgtgtctcccaagaccacggacccggaggagggttttccccgaagcctgggtgcctgccacctgctaggatcgcccaggcactccccatccacctctcctcgggcaagcatcacggaggagagctggctcggtgcccgcggctcccggcccacgtccccctgcaacaagcgcaagtacagtctcaatggccggcagccctcctgctcaccccaccactcacccacaccatccccccatggctcccctcgggtcagtgtgaccgaagatacctggctcggtaacaccacccagtataccagctctgccattgtggcagccatcaacgccctgaccaccgatagcactctggacctgggtgatggggtccctatcaagtctcgaaagacagcactggagcatgcgccctctgtggccctcaaagtagagccagctggggaagacctgggcaccactccacccacttctgacttcccacccgaggagtacaccttccagcaccttcggaagggtgccttttgcgagcagtatctgtcggtgccacaggcctcgtatcagtgggcgaagcccaagtctctttccccgacatcatatatgagcccatccttgcctgcccttgactggcagctcccgtcacattctggtccatacgagcttcggatcgaggtgcagcccaagtctcaccacagggctcactatgagacggaaggcagccggggggctgtgaaggcttcagctggaggacaccccattgtgcagctacacggttacttggagaatgaacctctcacgctacagctgttcattgggacggctgacgaccgcctgctgaggccccacgccttctaccaggtccaccggatcacggggaagactgtctccaccaccagccacgagatcatcctgtccaacaccaaagtcctggagatcccgttgcttccagaaaataacatgcgagccatcatcgactgtgctgggatcctgaagctcagaaactctgatattgagctgaggaaaggggagacagacatcgggaggaagaacaccagggtgaggctggtcttccgagttcacatcccacagcccaatggccggacgctgtctctccaggtggcctcgaaccctatcgagtgttcccagcggtcagcccaggagctgcccctcgtggagaagcagagcacagacagctacccagtcatcggcgggaagaagatggtgctgtctggccataactttctgcaagactccaaagtcattttcgtggagaaggctccagatggccaccacgtctgggagatggaagcaaagactgaccgggacctgtgcaagccaaattccctggtggttgagataccacctttccgcaaccagaggataaccagccccgcccaagtcagtttctatgtctgcaacgggaaacggaagagaagccagtaccagcgtttcacgtaccttcctgccaatggtaactctgtctttctaaccttaagctctgagagtgagctgagaggaggtttttactga

SEQ ID NO: 226 - DNA, 96597 bp, Homo sapiens
  misc_feature (9428)..(9725): "n" at positions 9428 to 9725 can be any base
  misc_feature (13303)..(21086): "n" at positions 13303 to 21086 can be any base
  misc_feature (30929)..(31963): "n" at positions 30929 to 31963 can be any base
aaggccctgaccggtttataaagagcacccatcttctccggcaccagacggccccagcctggcatctcgatgagtgaagcgtaatgagccagaattgcaggattaagcttcacttgaaactcactccggttcaaaacttaatggaaaaaatgcctggcaaaacttgtttggagctttattgaaccaaaacactttagaaaccgttggggaagctcagtgaacccaggctgtggtccagccccacgctttgtctagggcaggttccgttccctcaagcaggtgatgggaatcccggactggagcctgaggctgagcagccagaggccacaccgccagggccaggccacaccaccagggccggccacaccgccagggcaggccacaccgccggggccaggccacaccgccgcggcaggccacaccgccggggcctgcctcatcgccccacagtctggaatgctctgcacacgcatcagaaggagagtcgctgagcatcacaaaggaaaatagaaagcgcagcctcactgcccaaggccggggcagagatgacttgccttgtgttactgcctaattaaacagatttgggtaaacagatttgggtaaaccaagtagtttaaagaaaaatgttggaatattgccatttgaaaagtattattattttgcaagaggaaaacaattgtgagttcacagggacaaacccaaactcttgccagaaactaaaaatgtgatttatttacctctcgaccagcgttagcaaaaagagcaggcctgcaggatcaggacgcggctctgggccctcctgcctcagccctccggcactgtgagaggggcacacacccggggtgggtgtgcttgtcctgcgaagtgcagaacagagaagaggctccgaagcacagagcgcctctgccctgggctttgcacacattcctgacttcttaagacacagctgtgcaggaccattgcatctccgtgaagctgtcctcattggcctcaggctgacccgggcccctggcactcgagggccagggaaggggtcatgtctccctgagacacacatgtggcatcctttccccgcccccgtgcacaccagtggagtgtcagctcagccctgtttgtgctttctaagagaaatcgaggtttaaaggggacttttttttgcctagcgtggtgtgtgaggcccagatggctgcagcagctgtgccgggcttgcccggcctcctcaccgggagcttccctctggctagagttgctgtttcatctgcctgtgtccctgcggccccacccccatggaggaagcgaggaccctgttcagccatggccttcctgtgaattaggcctccttcaggtgcaagtgacagaatccacattaaactcgattgagcagaaaagggaagttgcttcctcaccaaggtgaagaccccaggggaggctctcaggtcccactagactcaggggctcaagcagggcatggaatcggcctctggagtccctgtctccatggcagccccggggtccacatcttccccaggagggcactcttcaggccccggcttcagaggaagagaacgccattccctgcggctgtggggcagcagcaggcacacctccctggcctcgggtgggctctgcccctgcgtgggctatggcgggagtgggaacattcccgtgacccccctggagtttaggccaggcagtggaggtcctcgagcaaaggtcatcccacagggagtgctctgtccagtaggagcatggcgcccatgtcagggcactggcctggaagggagcgtcttagtggaggctgtgggtgctgccaggccacctgagaggggacatgcattgtaggaaaggccacagcgcactgtgacaggtgtggtatcctggaaggaatgaaaaacactgcccggccaggcgcggtggctcatgcctataatcccagcactttgggaggccgaggcaggtggatcacgaggtcaggagatcgagaccagtctgaccaacatggtgaaaccccgtctctactgaaaatacaacaattagccaggtgcgatggtgggcacctgtaatctcagctactcgggaggctgaggcaggagaactgcttgaaccaggaaggcagaggttgcagtagccgagactgtgccattgcactccaacctgggcaacagagcgagactccgtctcaaaaaaaaaaaaaaaagaaaaaagaaaaccactgccctttgggttggtttcctggggctgccatcacaaatgaccacaaagtgggtggcttgaatggcagaaacatgtcctcagttctggaggccagaaggcacagtcgagggtcagcaaggccaagtgccctctggaaccggccacggaggtcccttcccttcctcttccagctcgtggtagccccaggtgctccttggctcgtggagccatcattccagtctctgcctctgtcggctcaccacattccctttgtctgtcttctcctcctgtgagggcaccagtcatcattggggtccccttaactgacaccatcttaactagttacaactgtagagatgtcacttaccaaattaggtctcattcccagagaccaggggacttcaatgaatcgttttggaggacgcagttcaattcacaacagcattgttctgaaataatgattaagctgtcttgagccattagcaggtgcctctcattgatctaccctgagaggtgaaggccgttactattggctcccgtaggtgtaccggggactggaatccaaactcgggctgtgggcaagcgccttctcacacgagagctgacgtgctctgtgaacccgtccccgggaaactggtcaagttaaaaacccccagccattgacagtctctggaaatggtcctaaggacacgcagcaagtgaagacacatctattgaaaaagacctgattttttaaaaaaccatctttactaggaaaggtgaatgtatttggtatttgaaccaaagccaccccctcctcccctccccctgccactccaccagcaggtctgctgcagctgaggacacaggtgggtgggggagagtgactctgggagggcgggatgtcggtgtttctcatcctgccccatctgcctgttgctggggctgctaggtcctggggagtctggtggaggggtgggggctcccttcttcccggtccccacactcatgggtgggaggctgggccttgggtgtggctcactgagaagacagggtgcaactacccttgcccccgctgacagggcagtgattccaggccaggggaggccagtggggtctcaggatgctgcccccgtcagcactcaactcctggaggtggaggcgtcactcacactgaggctcggcactgtccccatccccagctccaaagcattggctcagagattttgcctggagtgagaagcagtaagtaaaagagatagcttctaatctcctcccaaaagaaacgacttcattttcagcagaacatgggagaaggtgaaagcttagggtcccctcgaaaacatggaggttgtcatcaatggcatttgggacattcatggatttaatgaagatttagcctagatttaggaatgtgatagctgtgaggggcctccaggggtcaaaacaaatatcacacatggacatcagaaactcttgcttcaaagaaggcactatttagttggagtagtttgtagagtaatttatgcctccagatattgttaaaaacaatagagcaatccaatggcagccgtggaatttaacagctgggtatggtcagggaaagagaggaagagatctctatcaatgtggtcggggaaagagaggaagagatcgctctcaaaatcctgcattccagggtgactctgggcacaggtaagactcctctccctaaggagcaagccagaggcataactctgctggtggagggggcagtgtgtggaatagcttcactgcagtcatctcagaagtcacaagacaagtaaataagcaaataacaagccccacacagggggaccagtatccagagctgctataatacattgtctaaaatgcccagtttccaacaaaataggaggcatgcaaagaaacacaagagtatgacccccacatttaaattttttaaaaagcagacaacagaaactgcctggggaatgaccagatattggatttaatgggaaaaggccaaaatatcccttatatgctcagagaactaaagtaaatcttgattaaagaaagcaggacgacaatgtcacatcacgtagagactgttgatagaatgtataaaaaataaccagtggaaattcaggagttggaaggcgcagtcactgaagtgaaccattcactattggggctcaacaatcgatttgaactggcagaagaaagaaagtgaatttgaagatacatcagtagagagtatgcaagccccgaacagagagcagatagaatgaaggagaccaaggggagcctcggagagctgaggggcaccagggacgccctccagggcaccagcccacacagggggttcactagaaggaaaggaaagaggaaaaaagggatgcaaaaatattaaaagaaataatggttgaaaatatcgcagattagtttaaaaaaataacctacaaaaccaggaatctcaatgaactccaactggggcaagcctagagaggcccacagaccaacacattatgagtaaaaatgctgaaagtcaataataaggagaaaatctcaaaagccaaaataataaaataaggtatcacttacaagggaaccccaataaggctaacaagtgacttctaagcggcaacgatgtgagcctgaggcagtgggataacagccaaaggaaaggagagaggaggagaggggaggggaaaggagggggaggcagagggaggcagggagggaggaaggaaacctatcaatcccaaatcctatgcgcagcagagctttctttcaagaatgaaggtgaaataaagactttttccgacaaactgagagtttgttgccagctgacccaccttacaaaaaatactaaaggaagttcttcaggcagtgagcaagaaacttcagacagtaatttgaaatcacatgaaaaaaacagagtgcctcttaaggtaattacgtaatttcataagacagtacgaatacatatttttctctttttataactggtgtgaaaagtgattgtataaaataatgtatataaaatataatgttgggcctataacttatagcaatgtaatatatgtgtagtgtattgctaataacaatacaaagaaagggaatgagaacaaagctatattggactaaagaaataactacagatggtaaaataatggttatcacaatgtattcttaggtttgtaacattactgtttacaatgtagaatgtataaaagcgggaagggaatggagctagctacatagggatagtgtttttgtgtgtcactggagtcgaaatgtatatggtacatactagagcaatcactaaaacagtaacaaaaaaagtttaaaaactcagtagaaaataattcacttaatgcaaagaagtcaataaagaaataaatgaggggaagacataagaaaaatagaaaatgaaaagtaaagtggaatagaaatgaaaagtaaagttcaataataacattaaatgtgagtggatttaacaaccaatcagaaagcaaaggctgtcagactgaattaagaaaacatgacccaactttatgccgtctagaggagacatactttctactcaaagctacacacatagactacaacgatgggaaaagacgacacaccaacagcgacttcaggaaagctggagtggctgctaatgttagacaaaataggctttttaaaaaaggttttattaaagaggaatgtttcgtaatgataaaagcactaatctgtgagaaagatacaacaatgataaacatacgtgcagctaataagagagctccaaaatctatgaagcaaaaactcacagaatgaggggagaagcagttctacaacagagaatggggacttcgatactccactttcaataatggatacaacaaccaggcagataacaaggcaacagaaggcctgaacaacagtataaaccaattagacctaccagatatctatagctagcacactccacccaacgacagcagaatacacattcttctcaagcgcacaagtaacatcctccaggatgggccatgttctaggccatcaaacaaactcaggtggtttgaggccagaggcctctcttttaaccaccacactagggccttcggaggaggcaagcagagagttgtcaaagaggccctcaggactgggtgcagtggctcatgactgtaatcccagcactttagaaggctgaggcacaaggatcttttgagctcaggagttcaagaaatgagcacttatccactgggcgcggtggctcacgccagtaatccagcactttgggaggcttaggcgggcggatcaagaggtcagaagctcaagaccagcctgaccaacatggtgaaaccccgtctctactaaaagtacaaaaattagccgggcgtggtggcgcacacctgtaatcccagctacttgggaggctgaggcaggagaatcacttgaacccgggaggtggaggttgcagtgagtggagatcacaccattgcaccccagcctgggcaacagagcgagactccgtctcaaaaaaaaaaaaaaaaaaaagaaagaaagaaaaagaaaaaaaaagtgagcatgtattttgccagagtctggagattagaattaaattagcaaaccagaattatagaaaaagctatttacttttaagtaaacagctgagatttttttttttaagtcagtgtgaatgaagctcacagccatggttggagctgagaaagaaggatttccctttagttatgcacctgtgtcagcaccttctgactttccttctaaagtctggggtgttcctgaggatccgtaagtttggggttcagggtttctacagcatgctgttacttgtgaaacatctctttaaccatgtcccagagttgcccaggagtttaagaccagcctgagcaacatagcaagacctcatctcaacaacaacaaaaattagaaataaattagccaggtgtggtgacatgtgcctgtagtcccagctactcagaaggctgaggcatgaggatcacttgggcccaggaagttggggctgcagggagccctgttcatgccgctgcactccagcctgcaagacagagcagaaaaaaagaatcaggatcctgggcagagggaggagaggggaccggggtccagcaagcacttggggattgactgaatggcgttggggagagatgactccaaagtcctggagtgggtgagaatgactgcgagtggcttttaggtggggaggttcctgcctggccactccgggaggggacgtggggctgaagggtatcaggtgccgtgctgagcagtttggccttgatcctaatgccctggacacacgtctagggtaggaaagttgactgatccattggtgatctgagtttttagacatggtggtagtccatgaggtgggtgttcatgctaagagtttagacagggaaacctatgaagcccttagcaaccctccagggaaggggcgtggttaaagagatgtttcataagtaacagcatggtatagaaactctgaaccccaaatgtatgggtcctcaggaacaccccagactttagaaggaaagtcagaaggtgctgacacgggtgtataactaaagggaaatccttctttctcagctccaaccatggctgtgaggttcattcacactgacttaaaaaaaaaaatctcagtttacttaaaagtaaatagctttttctataattctggtttgctaatttaatcctagtctccagaccctggctaaataaatgcccatttctccagatggtctcaagagtctctggacatcgtgggggcccttccctgttggttggaaggtgcctcaggaagaagggggtggattctgagttgagtcaaaacctcaaagacccctgatgggaaaagctctcaagtgaccaccgctgtgggccagaatgcaaaactgcaggaacagaacattcgcaggaacagaacacagtcgtattaagtgattttcccgagcaggaagtggcatctggcctgcggttcagtagggggaggaaaagggtgggcgcacctgcccctggctggcgcacctgccaggtagccccacgcggcaccgcgtgtgccgagcgcccctgaggatggaaagccccacgcggggcaggtggcacccacccctccgaagacgggacgggatggagcgttgagcttcggggcagctccggcccggcccgcgctggagacgcccgcatctgccaggatggcgtctcatagccctggtgctcacacatgacgccaggaagccccagcaacagtgaccgcccaggctctagaaaatattggacggggtggatgaacacccaagtgcgctccaggagaagggatttggcaccccaaggggcttttaaaacggtaagcttctaggggtgtctttgcccccaataatccatagaaacaacagtcatctaaaaatagtcttgttttctgtcctaagctccttttaactttgttagtcatcaccaatcctaaaataaaacccgtgtaacgtctcccctagtagcggctataaacaaacctacgaggaggcaggaggaagaggaaaggggcgcagggcgctcggggagcagagccgggggcccgcggtggccgcagaggccgggccggggcgcagaggccgggcgagctggccgcgctctgggccgccgcctccggaactccctgcgcctggcgcgcggccaccgtggtcccggcaacggcattaaacagagggaaacagacccgggattccgtcacccgggcggggggataaggacggctttgagagcagacaggaaaagggagcttttctgcatggggtgaaaaaattatttattgaaggaggaggaggcggcagcggaggaaggggaggggcgggaggaggaggaagagccggccgcccccgccccggccccggctcctcaggagccaagggcagcctcgccaggtcggtcccgggctcgaggaccgcggctggggtcgaggggctcagtctcccacgtgaccggctgggcgcgccccgccagacccggcctcgggattccctcctcccggcgagtctccgcccgccccgtcctggaggtggggagaaggagggcggggcgggggggacggaaactctccccgccaaatcctggccccaggcctggggacactcgcggcgggaagatttggaggggaggggagggggaggggcgtgggggcgcggcctcgctggagtccccctccccccccgacccccgcccaccggcctgggcgtcctcccgcggcnnnnnnnnnnnnnnnnnnnnnnnnnnnnnnnnnnnnnnnnnnnnnnnnnnnnnnnnnnnnnnnnnnnnnnnnnnnnnnnnnnnnnnnnnnnnnnnnnnnnnnnnnnnnnnnnnnnnnnnnnnnnnnnnnnnnnnnnnnnnnnnnnnnnnnnnnnnnnnnnnnnnnnnnnnnnnnnnnnnnnnnnnnnnnnnnnnnnnnnnnnnnnnnnnnnnnnnnnnnnnnnnnnnnnnnnnnnnnnnnnnnnnnnnnnnnnnnnnnnnnnnnnnnnnnnnnnnnnnnnnnnnnnnnnnnnnnnnnnttattgaaggagaggggcgggcgctcggcgactcgtccccggggccccgcgcgggcccgggcagcaggggcgtgatgtcacggcagggagggggcgcgggagccgccgggccggcggggaggcgggggaggtgttctccagctttaaaaaggcaggaggcagagcgcggccctgcgtcagagcgagactcagaggctccgaactcgccggcggagtcgccgcgccagatcccagcagcagggcgcgggcaccggggcgcgggcagggctcggagccaccgcgcaggtcctagggccgcggccgggccccgccacgcgcgcacacgcccctcgatgactttcctccggggcgcgcggcgctgagcccggggcgagggctgtcttcccggagacccgaccccggcagcgcggggcggccgcttctcctgtgcctccgcccgccgctccactccccgccgccgccgcgcggatgccaagcaccagctttccagtcccttccaagtttccacttggccctgcggctgcggtcttcgggagaggagaaactttggggcccgcgccgcgcgccggcggcaccatgaagtcagcggaggaaggtaagccccgcgcggcctccgcccccggacccctgcgccccccacggcccgggccgcgccccccgaccccgcccccgtcgcccgcacggaggggtccgggccagagaacgaggtcggccgggtctgtgcgcccagggaggggcgcggcgcggaccgggaacggcgtcccccagctcccagcagcccggttccgagcgcgccttctgccaataggtgtctcctctgccccagcgctgagggcgcgaggcgaggccgccgcgggtcccgccgaggaagcggctcgcaggccggcgatttggggacgggcgaggctgggccgtcaggaccacagagggcacgtgggagggaggaagggaggcttccttgggagtgaaggatgccccgtgtcttcctgagcgaggcagagccaccctctggcgccaagatcgcggtttgggggttctgcgccccccacccccaccccgagctcgtggcggcgtctccctcgcgccgcgcccctgaattccccagggccgagcccgtcacgccggctcctggacctgcaggaccaaaagatccaaagcgcggccgcagcacagccccgaatttaagccattttgaaatcctataggcaggagttccagccagagaagatgtttcaggcaagtttgaaaaggaaccgccaagtttcgagctgcttctttatagtgaaaaaaagatggcacagtgtgggtccctgaaacccggtgtggggggcgctgagacccccctgcggcgcatctcacattccagtcccccaccttagcccgtccccggcacacacccctggcgatgccgggtgggctcctgcaagtggctttgaaaatacccttgcagaggtgtgagcatacgagttagggattagggattgcaatgctaatggaaattggaagacgcttttccaaattccttaccagctctgaaatattttatataatttatttaaagagcgccagcacacctgccaacatatgtacttcataagggcagacgtccttccgagcgctgccgcttcctgcgcgaccctgataactgcggggcttgcttgagaaccgggctcccccagctctggaaaactcgctggtcttagcagagctgagcacagggccgtgagctccacggaggggggtccgtgtggtcggtgccctgacgcttcacgggacgggaggtagacaccacttcatcccaatgttagaaaatgttgacatgtttaaaccatgtcccgtgtcagtgttttacacaatgtgctcttgctagtagcagagtttaaaaaatttttttttgttggagtttcggttttaaatcctgggacacttacgccgcagtgttcattatcactccctttagaaaggcaggtctttccaagttcagatctctgtacctgaagagccggtggccgacctgtagtaaggagcccctttcttttacgcaaggaaaaaacacgacggggcagtggctagttttcgtgtttcctactgaagaaaataagctcgaaaaggtccctgctgcaaggcagtgcgccgggcagcgacgcccgaccgacatgggtgtattttatgagggctgcagaactgggccagccggaaagtgtgatctagtccttgatacacacaggccggcagcatggggacacgcgtggtttccacaccagccatcgctgagaccaccgggaagaactctgagtccttctgagtaggccccacgaggccattcctggcccatctgaggacctgggcgcctcccctgcgtccctcgggtttcgggaccatctgggtggaagctcattaggcgtcgtggttcctgaaggccccgggcttgcttcctcatggagaacgcagagaagtacaggcctgtaagtagccacccagtcagaagtcgctccagacacaatgccccacgggctggggccaaacaaagctcaccctgttctctgccacttaacttcacagcgttgtttcccagctcagattagaaaatggcagggcgctggcaccccgcttcatcacacccagcggggcttctgtctccgcagacatccccagcctctgggaggatgcgtccaagctaaacatttccatggagacacccagtgtctgtggaacgggcagctttgaatctggaccaatagctctgaaccatttgcaggaaggaagcccagcactggggcgggggaagggggggctcctaggagcagcaggggagccgccccaccgaccccttctctgggatggagaccagtgcagtcctaggacagcagcagtgagcctccatccctgcagggcccgcggcctggggccaccagcaggcgggacagtttagcaaaaagttttagtctaaacagatgataagggctgtcatttgtgtataattttatggtgggggtaaaaaggtggctggagttttaaaaacaatgtacaggccgggcgccgcggctcacgcctgtaatcccagcactttgggaggccgaggcaagcggatcacgaggtcaagagatcgagaccatcctggtcaacatggtgaaaccccgtctctactaaaactacaaaaattagctgagagtggtggcgggtgcctgtagtcccagctactctggaggctgaggcaggagaatcgcttgaactcggaaggcggaggttgcagtgagcagagattgcaccactgcactccagcctgggtgacagagcgagactccgtctcaaacaaacaaaaacctgtacaatggaaagagaatgaaacgttgtggcttctcaacagaaaacagaacttccacttgcccaaggtcggcaaaagcagcaaaactacaacaaaacaacgctccaacatccatcccaaagtcagaagtattattagaaactaaatcaggccacacggaacgatggcttatcactggagaaaaccagccagtgaaagggtcgcgggagaagcccggggacgaccctgggactggagggtttctcgcctctgnnnnnnnnnnnnnnnnnnnnnnnnnnnnnnnnnnnnnnnnnnnnnnnnnnnnnnnnnnnnnnnnnnnnnnnnnnnnnnnnnnnnnnnnnnnnnnnnnnnnnnnnnnnnnnnnnnnnnnnnnnnnnnnnnnnnnnnnnnnnnnnnnnnnnnnnnnnnnnnnnnnnnnnnnnnnnnnnnnnnnnnnnnnnnnnnnnnnnnnnnnnnnnnnnnnnnnnnnnnnnnnnnnnnnnnnnnnnnnnnnnnnnnnnnnnnnnnnnnnnnnnnnnnnnnnnnnnnnnnnnnnnnnnnnnnnnnnnnnnnnnnnnnnnnnnnnnnnnnnnnnnnnnnnnnnnnnnnnnnnnnnnnnnnnnnnnnnnnnnnnnnnnnnnnnnnnnnnnnnnnnnnnnnnnnnnnnnnnnnnnnnnnnnnnnnnnnnnnnnnnnnnnnnnnnnnnnnnnnnnnnnnnnnnnnnnnnnnnnnnnnnnnnnnnnnnnnnnnnnnnnnnnnnnnnnnnnnnnnnnnnnnnnnnnnnnnnnnnnnnnnnnnnnnnnnnnnnnnnnnnnnnnnnnnnnnnnnnnnnnnnnnnnnnnnnnnnnnnnnnnnnnnnnnnnnnnnnnnnnnnnnnnnnnnnnnnnnnnnnnnnnnnnnnnnnnnnnnnnnnnnnnnnnnnnnnnnnnnnnnnnnnnnnnnnnnnnnnnnnnnnnnnnnnnnnnnnnnnnnnnnnnnnnnnnnnnnnnnnnnnnnnnnnnnnnnnnnnnnnnnnnnnnnnnnnnnnnnnnnnnnnnnnnnnnnnnnnnnnnnnnnnnnnnnnnnnnnnnnnnnnnnnnnnnnnnnnnnnnnnnnnnnnnnnnnnnnnnnnnnnnnnnnnnnnnnnnnnnnnnnnnnnnnnnnnnnnnnnnnnnnnnnnnnnnnnnnnnnnnnnnnnnnnnnnnnnnnnnnnnnnnnnnnnnnnnnnnnnnnnnnnnnnnnnnnnnnnnnnnnnnnnnnnnnnnnnnnnnnnnnnnnnnnnnnnnnnnnnnnnnnnnnnnnnnnnnnnnnnnnnnnnnnnnnnnnnnnnnnnnnnnnnnnnnnnnnnnnnnnnnnnnnnnnnnnnnnnnnnnnnnnnnnnnnnnnnnnnnnnnnnnnnnnnnnnnnnnnnnnnnnnnnnnnnnnnnnnnnnnnnnnnnnnnnnnnnnnnnnnnnnnnnnnnnnnnnnnnnnnnnnnnnnnnnnnnnnnnnnnnnnnnnnnnnnnnnnnnnnnnnnnnnnnnnnnnnnnnnnnnnnnnnnnnnnnnnnnnnnnnnnnnnnnnnnnnnnnnnnnnnnnnnnnnnnnnnnnnnnnnnnnnnnnnnnnnnnnnnnnnnnnnnnnnnnnnnnnnnnnnnnnnnnnnnnnnnnnnnnnnnnnnnnnnnnnnnnnnnnnnnnnnnnnnnnnnnnnnnnnnnnnnnnnnnnnnnnnnnnnnnnnnnnnnnnnnnnnnnnnnnnnnnnnnnnnnnnnnnnnnnnnnnnnnnnnnnnnnnnnnnnnnnnnnnnnnnnnnnnnnnnnnnnnnnnnnnnnnnnnnnnnnnnnnnnnnnnnnnnnnnnnnnnnnnnnnnnnnnnnnnnnnnnnnnnnnnnnnnnnnnnnnnnnnnnnnnnnnnnnnnnnnnnnnnnnnnnnnnnnnnnnnnnnnnnnnnnnnnnnnnnnnnnnnnnnnnnnnnnnnnnnnnnnnnnnnnnnnnnnnnnnnnnnnnnnnnnnnnnnnnnnnnnnnnnnnnnnnnnnnnnnnnnnnnnnnnnnnnnnnnnnnnnnnnnnnnnnnnnnnnnnnnnnnnnnnnnnnnnnnnnnnnnnnnnnnnnnnnnnnnnnnnnnnnnnnnnnnnnnnnnnnnnnnnnnnnnnnnnnnnnnnnnnnnnnnnnnnnnnnnnnnnnnnnnnnnnnnnnnnnnnnnnnnnnnnnnnnnnnnnnnnnnnnnnnnnnnnnnnnnnnnnnnnnnnnnnnnnnnnnnnnnnnnnnnnnnnnnnnnnnnnnnnnnnnnnnnnnnnnnnnnnnnnnnnnnnnnnnnnnnnnnnnnnnnnnnnnnnnnnnnnnnnnnnnnnnnnnnnnnnnnnnnnnnnnnnnnnnnnnnnnnnnnnnnnnnnnnnnnnnnnnnnnnnnnnnnnnnnnnnnnnnnnnnnnnnnnnnnnnnnnnnnnnnnnnnnnnnnnnnnnnnnnnnnnnnnnnnnnnnnnnnnnnnnnnnnnnnnnnnnnnnnnnnnnnnnnnnnnnnnnnnnnnnnnnnnnnnnnnnnnnnnnnnnnnnnnnnnnnnnnnnnnnnnnnnnnnnnnnnnnnnnnnnnnnnnnnnnnnnnnnnnnnnnnnnnnnnnnnnnnnnnnnnnnnnnnnnnnnnnnnnnnnnnnnnnnnnnnnnnnnnnnnnnnnnnnnnnnnnnnnnnnnnnnnnnnnnnnnnnnnnnnnnnnnnnnnnnnnnnnnnnnnnnnnnnnnnnnnnnnnnnnnnnnnnnnnnnnnnnnnnnnnnnnnnnnnnnnnnnnnnnnnnnnnnnnnnnnnnnnnnnnnnnnnnnnnnnnnnnnnnnnnnnnnnnnnnnnnnnnnnnnnnnnnnnnnnnnnnnnnnnnnnnnnnnnnnnnnnnnnnnnnnnnnnnnnnnnnnnnnnnnnnnnnnnnnnnnnnnnnnnnnnnnnnnnnnnnnnnnnnnnnnnnnnnnnnnnnnnnnnnnnnnnnnnnnnnnnnnnnnnnnnnnnnnnnnnnnnnnnnnnnnnnnnnnnnnnnnnnnnnnnnnnnnnnnnnnnnnnnnnnnnnnnnnnnnnnnnnnnnnnnnnnnnnnnnnnnnnnnnnnnnnnnnnnnnnnnnnnnnnnnnnnnnnnnnnnnnnnnnnnnnnnnnnnnnnnnnnnnnnnnnnnnnnnnnnnnnnnnnnnnnnnnnnnnnnnnnnnnnnnnnnnnnnnnnnnnnnnnnnnnnnnnnnnnnnnnnnnnnnnnnnnnnnnnnnnnnnnnnnnnnnnnnnnnnnnnnnnnnnnnnnnnnnnnnnnnnnnnnnnnnnnnnnnnnnnnnnnnnnnnnnnnnnnnnnnnnnnnnnnnnnnnnnnnnnnnnnnnnnnnnnnnnnnnnnnnnnnnnnnnnnnnnnnnnnnnnnnnnnnnnnnnnnnnnnnnnnnnnnnnnnnnnnnnnnnnnnnnnnnnnnnnnnnnnnnnnnnnnnnnnnnnnnnnnnnnnnnnnnnnnnnnnnnnnnnnnnnnnnnnnnnnnnnnnnnnnnnnnnnnnnnnnnnnnnnnnnnnnnnnnnnnnnnnnnnnnnnnnnnnnnnnnnnnnnnnnnnnnnnnnnnnnnnnnnnnnnnnnnnnnnnnnnnnnnnnnnnnnnnnnnnnnnnnnnnnnnnnnnnnnnnnnnnnnnnnnnnnnnnnnnnnnnnnnnnnnnnnnnnnnnnnnnnnnnnnnnnnnnnnnnnnnnnnnnnnnnnnnnnnnnnnnnnnnnnnnnnnnnnnnnnnnnnnnnnnnnnnnnnnnnnnnnnnnnnnnnnnnnnnnnnnnnnnnnnnnnnnnnnnnnnnnnnnnnnnnnnnnnnnnnnnnnnnnnnnnnnnnnnnnnnnnnnnnnnnnnnnnnnnnnnnnnnnnnnnnnnnnnnnnnnnnnnnnnnnnnnnnnnnnnnnnnnnnnnnnnnnnnnnnnnnnnnnnnnnnnnnnnnnnnnnnnnnnnnnnnnnnnnnnnnnnnnnnnnnnnnnnnnnnnnnnnnnnnnnnnnnnnnnnnnnnnnnnnnnnnnnnnnnnnnnnnnnnnnnnnnnnnnnnnnnnnnnnnnnnnnnnnnnnnnnnnnnnnnnnnnnnnnnnnnnnnnnnnnnnnnnnnnnnnnnnnnnnnnnnnnnnnnnnnnnnnnnnnnnnnnnnnnnnnnnnnnnnnnnnnnnnnnnnnnnnnnnnnnnnnnnnnnnnnnnnnnnnnnnnnnnnnnnnnnnnnnnnnnnnnnnnnnnnnnnnnnnnnnnnnnnnnnnnnnnnnnnnnnnnnnnnnnnnnnnnnnnnnnnnnnnnnnnnnnnnnnnnnnnnnnnnnnnnnnnnnnnnnnnnnnnnnnnnnnnnnnnnnnnnnnnnnnnnnnnnnnnnnnnnnnnnnnnnnnnnnnnnnnnnnnnnnnnnnnnnnnnnnnnnnnnnnnnnnnnnnnnnnnnnnnnnnnnnnnnnnnnnnnnnnnnnnnnnnnnnnnnnnnnnnnnnnnnnnnnnnnnnnnnnnnnnnnnnnnnnnnnnnnnnnnnnnnnnnnnnnnnnnnnnnnnnnnnnnnnnnnnnnnnnnnnnnnnnnnnnnnnnnnnnnnnnnnnnnnnnnnnnnnnnnnnnnnnnnnnnnnnnnnnnnnnnnnnnnnnnnnnnnnnnnnnnnnnnnnnnnnnnnnnnnnnnnnnnnnnnnnnnnnnnnnnnnnnnnnnnnnnnnnnnnnnnnnnnnnnnnnnnnnnnnnnnnnnnnnnnnnnnnnnnnnnnnnnnnnnnnnnnnnnnnnnnnnnnnnnnnnnnnnnnnnnnnnnnnnnnnnnnnnnnnnnnnnnnnnnnnnnnnnnnnnnnnnnnnnnnnnnnnnnnnnnnnnnnnnnnnnnnnnnnnnnnnnnnnnnnnnnnnnnnnnnnnnnnnnnnnnnnnnnnnnnnnnnnnnnnnnnnnnnnnnnnnnnnnnnnnnnnnnnnnnnnnnnnnnnnnnnnnnnnnnnnnnnnnnnnnnnnnnnnnnnnnnnnnnnnnnnnnnnnnnnnnnnnnnnnnnnnnnnnnnnnnnnnnnnnnnnnnnnnnnnnnnnnnnnnnnnnnnnnnnnnnnnnnnnnnnnnnnnnnnnnnnnnnnnnnnnnnnnnnnnnnnnnnnnnnnnnnnnnnnnnnnnnnnnnnnnnnnnnnnnnnnnnnnnnnnnnnnnnnnnnnnnnnnnnnnnnnnnnnnnnnnnnnnnnnnnnnnnnnnnnnnnnnnnnnnnnnnnnnnnnnnnnnnnnnnnnnnnnnnnnnnnnnnnnnnnnnnnnnnnnnnnnnnnnnnnnnnnnnnnnnnnnnnnnnnnnnnnnnnnnnnnnnnnnnnnnnnnnnnnnnnnnnnnnnnnnnnnnnnnnnnnnnnnnnnnnnnnnnnnnnnnnnnnnnnnnnnnnnnnnnnnnnnnnnnnnnnnnnnnnnnnnnnnnnnnnnnnnnnnnnnnnnnnnnnnnnnnnnnnnnnnnnnnnnnnnnnnnnnnnnnnnnnnnnnnnnnnnnnnnnnnnnnnnnnnnnnnnnnnnnnnnnnnnnnnnnnnnnnnnnnnnnnnnnnnnnnnnnnnnnnnnnnnnnnnnnnnnnnnnnnnnnnnnnnnnnnnnnnnnnnnnnnnnnnnnnnnnnnnnnnnnnnnnnnnnnnnnnnnnnnnnnnnnnnnnnnnnnnnnnnnnnnnnnnnnnnnnnnnnnnnnnnnnnnnnnnnnnnnnnnnnnnnnnnnnnnnnnnnnnnnnnnnnnnnnnnnnnnnnnnnnnnnnnnnnnnnnnnnnnnnnnnnnnnnnnnnnnnnnnnnnnnnnnnnnnnnnnnnnnnnnnnnnnnnnnnnnnnnnnnnnnnnnnnnnnnnnnnnnnnnnnnnnnnnnnnnnnnnnnnnnnnnnnnnnnnnnnnnnnnnnnnnnnnnnnnnnnnnnnnnnnnnnnnnnnnnnnnnnnnnnnnnnnnnnnnnnnnnnnnnnnnnnnnnnnnnnnnnnnnnnnnnnnnnnnnnnnnnnnnnnnnnnnnnnnnnnnnnnnnnnnnnnnnnnnnnnnnnnnnnnnnnnnnnnnnnnnnnnnnnnnnnnnnnnnnnnnnnnnnnnnnnnnnnnnnnnnnnnnnnnnnnnnnnnnnnnnnnnnnnnnnnnnnnnnnnnnnnnnnnnnnnnnnnnnnnnnnnnnnnnnnnnnnnnnnnnnnnnnnnnnnnnnnnnnnnnnnnnnnnnnnnnnnnnnnnnnnnnnnnnnnnnnnnnnnnnnnnnnnnnnnnnnnnnnnnnnnnnnnnnnnnnnnnnnnnnnnnnnnnnnnnnnnnnnnnnnnnnnnnnnnnnnnnnnnnnnnnnnnnnnnnnnnnnnnnnnnnnnnnnnnnnnnnnnnnnnnnnnnnnnnnnnnnnnnnnnnnnnnnnnnnnnnnnnnnnnnnnnnnnnnnnnnnnnnnnnnnnnnnnnnnnnnnnnnnnnnnnnnnnnnnnnnnnnnnnnnnnnnnnnnnnnnnnnnnnnnnnnnnnnnnnnnnnnnnnnnnnnnnnnnnnnnnnnnnnnnnnnnnnnnnnnnnnnnnnnnnnnnnnnnnnnnnnnnnnnnnnnnnnnnnnnnnnnnnnnnnnnnnnnnnnnnnnnnnnnnnnnnnnnnnnnnnnnnnnnnnnnnnnnnnnnnnnnnnnnnnnnnnnnnnnnnnnnnnnnnnnnnnnnnnnnnnnnnnnnnnnnnnnnnnnnnnnnnnnnnnnnnnnnnnnnnnnnnnnnnnnnnnnnnnnnnnnnnnnnnnnnnnnnnnnnnnnnnnnnnnnnnnnnnnnnnnnnnnnnnnnnnnnnnnnnnnnnnnnnnnnnnnnnnnnnnnnnnnnnnnnnnnnnnnnnnnnnnnnnnnnnnnnnnnnnnnnnnnnnnnnnnnnnnnnnnnnnnnnnnnnnnnnnnnnnnnnnnnnnnnnnnnnnnnnnnnnnnnnnnnnnnnnnnnnnnnnnnnnnnnnnnnnnnnnnnnnnnnnnnnnnnnnnnnnnnnnnnnnnnnnnnnnnnnnnnnnnnnnnnnnnnnnnnnnnnnnnnnnnnnnnnnnnnnnnnnnnnnnnnnnnnnnnnnnnnnnnnnnnnnnnnnnnnnnnnnnnnnnnnnnnnnnnnnnnnnnnnnnnnnnnnnnnnnnnnnnnnnnnnnnnnnnnnnnnnnnnnnnnnnnnnnnnnnnnnnnnnnnnnnnnnnnnnnnnnnnnnnnnnnnnnnnnnnnnnnnnnnnnnnnnnnnnnnnnnnnnnnnnnnnnnnnnnnnnnnnnnnnnnnnnnnnnnnnnnnnnnnnnnnnnnnnnnnnnnnnnnnnnnnnnnnnnnnnnnnnnnnnnnnnnnnnnnnnnnnnnnnnnnnnnnnnnnnnnnnnnnnnnnnnnnnnnnnnnnnnnnnnnnnnnnnnnnnnnnnnnnnnnnnnnnnnnnnnnnnnnnnnnnnnnnnnnnnnnnnnnnnnnnnnnnnnnnnnnnnnnnnnnnnnnnnnnnnnnnnnnnnnnnnnnnnnnnnnnnnnnnnnnnnnnnnnnnnnnnnnnnnnnnnnnnnnnnnnnnnnnnnnnnnnnnnnnnnnnnnnnnnnnnnnnnnnnnnnnnnnnnnnnnnnnnnnnnnnnnnnnnnnnnnnnnnnnnnnnnnnnnnnnnnnnnnnnnnnnnnnnnnnnnnnnnnnnnnnnnnnnnnnnnnnnnnnnnnnnnnnnnnnnnnnnnnnnnnnnnnnnnnnnnnnnnnnnnnnnnnnnnnnnnnnnnnnnnnnnnnnnnnnnnnnnnnnnnnnnnnnnnnnnnnnnnnnnnnnnnnnnnnnnnnnnnnnnnnnnnnnnnnnnnnnnnnnnnnnnnnnnnnnnnnnnnnnnnnnnnnnnnnnnnnnnnnnnnnnnnnnnnnnnnnnnnnnnnnnnnnnnnnnnnnnnnnnnnnnnnnnnnnnnnnnnnnnnnnnnnnnnnnnnnnnnnnnnnnnnnnnnnnnnnnnnnnnnnnnnnnnnnnnnnnnnnnnnnnnnnnnnnnnnnnnnnnnnnnnnnnnnnnnnnnnnnnnnnnnnnnnnnnnnnnnnnnnnnnnnnnnnnnnnnnnnnnnnnnnnnnnnnnnnnnnnnnnnnnnnnnnnnnnnnnnnnnnnnnnnnnnnnnnnnnnnnnnnnnnnnnnnnnnnnnnnnnnnnnnnnnnnnnnnnnnnnnnnnnnnnnnnnnnnnnnnnnnnnnnnnnnnnnnnnnnnnnnnnnnnnnnnnnnnnagcctgggggcggggggcacagtggatgccagtgaacatgggtggtcagtcccagagctggcgtcttgcagctggggcagatcctggggatggtgtgtgtgtcctgaccagaggccaggctggaggctggaattggcgtcaggatgcccagctccagctccaccccagtccctgcctgtggctctggggaaagaaagacctccttattgatttattgatttattgatttgacagggtcttgctgtgtcgcccaggctggagtgcaggctggagtgatctcagctcactgcaacctctgcctcctgggctcaagcaatcctgctgcctcagcctcccaagtagctgggactacaggcgtgcgccaccatgcctggctacttgtattttttgtagagatagggtttcatcatgttgcccagattggtcttgaacttctgacctcagatgatccgcccacctcggcctcccaaagtgctgggattataggcgtgagccaccgcgcctggccacctccttgatttattgacattactgttctctctccggtgcaggagactgcgtggctcccgtcctcttgagggcatttctttacgatggggaaggcgggactggggcctggctagcaccatccccaaggcgctcagcctcagcggaggggcccttcccatacgaagacatcctgagcaggtctcacctcccacccctgagagcttctggtcgcacctgtgaggtgtggctccatcgcagctctgtttcttttctctttgttatggctctgccccctgagtgtctggaatttccagaaagcagctgtgactcctgggattgaggccacggtgtgtcctcttaccaggctgccgtgccgtgtttcccacctacctggggcgctagaaccatttctgttagtaaatacagtgggtttgtattggtattttgagaccctagatttttttggcatttatccgtgttggtttctgaaccacgacttagcggaaagacagcactgtccttgaataaagtatcttccagccagtgcagttgcaccaggagatgaatatagaatttccatgtgcttgtttgtattatttagaggcctgggaatacccacctctaggcatgtaatcatgaggttccaagatgtcataaaaagtcttttcaaatcagaaatccagaggcacgtctttcctgttaaaattactgatttccctaataatgattttaaaaaatattttattgagtgtaattaacacataatgattcttaggactagctgtgtaccagaatcttctgttttgttctaaaagatggattcgtaggatatgagccagtatcagaatctccatgagggggatttcacagtctgtgttttcatccaatccttgaggagttttctttgtagctggtgattagggcaccttgacagtgataagcctgttaaaatctgtttacatatgtaggtccttagatctaaaacacatccaccatccatcatcatccatccatcatcaaaccattattcctccattccctatgcatccatgcatcatcatctgtccattattcctccattccctatccattcattcatcatccatccatccatcatccatccatccatcatcaaaccattattcctccattccctatccatccatccatcatccatccatcatcatccatccattattcctccattccctatccattcattcatcatccatccatccatcatcatccatccatcatcaaaccattattcctccattccctatccatccattcatccatcatccatcatccatccattattcctccattccctatccatccatctatcatccatccatcattatccatcatccatccattcctccattccctatccattcattcatccatccatccatccatcatcattcatccatccatccatcatccatccattattcctccattcctcgtccatccatccatccatcaccatccatttatctatccatccattcatccaccatttacctatcatgcctccatccccaatgcatcattcatccatccatccgtttagctgtccatccatccatcatccatccattcatccacccacccataatccatctctttatccctcattcctcccttgtttgtccatcaccatccatctacctactctccatctacccatcatcccttcaccccccgtccatcatgatccatccatcagtttctttacctgtctatccatcatccattgtccacccacccaccaaccatccatccattaaacaaattgaacacattttatgtgccaggcacagtctttggctctgaaaacagcggtgagcagaatagactaaggcgtccagatgttctgtcttcatggaacttaggtttctgtttgtcaaagagatgacagtgtgggatgaatgagtaaaaacaggctgttagattgtgatacgtatttaggagaaaaaataaactagagaaggatggcccacgtgttgagtttggggtttaaatgaagatggggtggttgaggaaggtggtttttgaatgaagagtggaacccgtgaggacccagtcgcctctctctgggaaggacgttcggatgaagatggggtggttggggaaggtggtttttgaatgaagagcggaacccgtgaggacccggccgcctctccctgggaaggacgttcgggggcttgtgctgctgttaggggaggaggggaggtgggcagtgaggggctcacgggagccttgttggccaggtgggactggggctgtcactccaagtcgcccggagctgtccggcagcgtggtctcagggacgtttgctgaggcccgctccttggggtccgttggtcgaggccgggggttgctggccggccctgagttcatgggtttctgctttgtgatgcccagcccctcatgctcccatctgcttctttttctctctagaacactatggctatgcatcctccaacgtcagccccgccctgccgctccccacggcgcactccaccctgccggccccgtgccacaaccttcagacctccacaccgggcatcatcccgccggcggatcacccctcggggtacggagcagctttggacggtgggcccgcgggctacttcctctcctccggccacaccaggcctgatggggcccctgccctggagagtcctcgcatcgagataacctcgtgcttgggcctgtaccacaacaataaccagtttttccacgatgtggaggtggaagacgtcctccctagctccaaacggtccccctccacggccacgctgagtctgcccagcctggaggcctacagagacccctcgtgcctgagcccggccagcagcctgtcctcccggagctgcaactcagaggcctcctcctacgagtccaactactcgtacccgtacgcgtccccccagacgtcgccatggcagtctccctgcgtgtctcccaagaccacggaccccgaggagggctttccccgcgggctgggggcctgcacactgctgggttccccgcggcactccccctccacctcgccccgcgccagcgtcactgaggagagctggctgggtgcccgctcctccagacccgcgtccccgtgcaacaagaggaagtacagcctcaacggccggcagccgccctactcaccccaccactcgcccacgccgtccccgcacggctccccgcgggtcagcgtgaccgacgactcgtggttgggcaacaccacccagtacaccagctcggccatcgtggccgccatcaacgcgctgaccaccgacagcagcctggacctgggagatggcgtccctgtcaagtcccgcaagaccaccctggagcagccgccctcagtggcgctcaaggtggagcccgtcggggaggacctgggcagccccccgcccccggccgacttcgcgcccgaagactactcctctttccagcacatcaggaagggcggcttctgcgaccagtacctggcggtgccgcagcacccctaccagtgggcgaagcccaagcccctgtcccctacgtcctacatgaggtgagccggcagcgcggggcgggacggggaggcgaggggaggcgcggggcggggcggaacgcggggagcgggacggggggcggcgcggggcggccgtgtctggggacgagagtcaggacctgggtgggcaggtgggctcctcgtggagctgggaggcagagtctgtccccatgtctgcctcctcatgcagacttttccttgtgcgcctcgcctctgcctccgtctgcgcgtttcccatctgaagtctccagatcctctcgggccctgctgatggcctcgtgttcgctcagtctctgcaaacacccatttcaaagagggtggccctgctggcggtcagggcttccacgtgggaattccgggagacgccatccgcccctaaggagggctcacacacgcgcagtttcttcctcggggaattgcacgtgcctggcccccctcggtggttgcctgctgctcccgcttcctcccctgcagtaattgccttccctgcctcgggtgcagatgggaccgcagctcaacagtgccccagagcacccagtccgccacgctttggaacagcacggcctcctgctccccagagacgccggctgtggcatcaggctgggggagctcacgcgccttccttctttgggtcccaggttgttggtttttctttttaaccgtgtgaggggctgctggaattccgctgggtccacttaaccagcttggtgtttttatctctaacgaaacagctttcccagctggtgggctgtgagtggcccctgagagtgctttctgctctgggatttttatctgaggcatgaaaacgtccgtgcaggaggtcgagggcagtgccccatggcccgtgacgtcagggctgccgctgtgtcctcaggaagaggcgtttgccacgcgcagcccggggtattccaggctgggtgttttcctgtttttgtttttttttttttttcgtccctccccaccccccactccttttttattagcgagcactcagggggcgagaccccgcagagcggagggcaggtgcagcccccatgcctgcagggtgaggaaggcaggcagtgagggtgctctgggaggacccgtctctgctctgcagtctcaggccatgcttcagccatggctggagcacgcatggacagaattagagctacaagcagtaacaagcctccaggctgggaacgaacccacccaaacctctctgaaggcttgtggcaaagaaacagtgttagagctgacagttctttgagcagccccatggctgattctgcctttctactggcgtgatacttagaatcgtcgtcagctgaggtttcgagagaaagcaaggattacccctgatttttcttgacttgcagtgggcgcatttacctttctatcccaacttctgtttttaatacattaaggtttaaaaggctggcgtattctaggtgatcacaacgagcctgtgtcaggacccggattgtatttacaataaaaatcccattcagttggaggcattgggaaaatttaagaactgtttttgcctgctgtactatcactgttattgtttaagtaaaagtacaagcgtagtggcactgactctccagcccacagtcatgtacaacgcgcttcatggtctccaggcttacggacggtgacaaagtcgtccatcaccgcggaacttcactgaactggcgagataagggaagagtgatgtcatcaaggtcccaagactgggacttggcatgaggagtgtcgtaatgcagttgtgaacctttgggtgaaccccacgtatttgtttcctggggctgccctgacaaggtcccgcagacgggtggccttcatagcaggaaggttttctcgcggggtcctgagactggaagccgagatcaggggctgttcttttggaggctgtgagggagcatctgcctgacctgtctccctggcttggaggcgccgtcttctccccatgactcctcatctctccatccaccgtgcatgtctgtgtccagatgtccccttttgtgaggacactggtcctgctgggttggggccaccctggtggcctcatttgaacttgatcgctctgtaaagaccctctctccagacacagccccacgctgggcaggactccattatgtgagtttgcggggagcaccgttcggctgcctcagccccggtcttactgtcgcagtaaaaatggcaggcagcctttgaaagcgcaagctcgtcctggttccttcttcgtctcctgggcggcaaggtgtccgcagggatgtcgtgttctggcaggcacagcccctcctgtccaccttggacctgtgtttggtgtggaggttggaaagcatgggtggctgtttattttttcctctgcttgggggtttcaggaagaattccgtgcccacgtgaccctgttagctttatctcctggctgcagagcgcccagttaggtgtgatgcctgtaacatttctgagtgttcacacaaacaaagctcagtaaatatgtcccaaactcgctcctggggtttgcagttaaccttttcccactgttctggttccacatcaaaatatgtttcctggttccttgtgccctgtttccaagtgacctcgtcagcgggtgccctggggcagctggaagccacggcagagatgaaatgttagttttttaccagcgaggtggagaggccagacttccttccccaggaatgcctctccgtcggtcacatgcagcagctctggcaggcgtggaaaatgtcaccaggatctcaggctgcacaactagaaagctgtatttttaatgatctccaaagtttgggatggagaatgcacgacatgcccatcttctccccaccgtggtacagaactgctgctccattaatcctgtccctatgccagaaggagctttctggtggaaagtgtgctgtgtgcatccttcccagggaccgtctaggattgttgtcctttgaggccttttgttgcttgttcagcacctgtggcccccagtgctatgcagagcctctgagaggcccacaatggtcaaagaacgatactgaattcttgctgcaattgaagccatgataatgtttgtgaagttagtaagagtaggtgatagaaccttgatagttttagagtttggagccattttagagctcagcggaatgatgtgtctattgtcaaagcttggggggactggcacaggaatcacaggccacctgctataccccctaaaaattagaatcttaagctgtgaattctggcatcagaaaggagtggttttcttcccgccttgcttctttccaggggtaatgacggtgatcatagcaagtggcctcccagggcacctttccgtgtgctgttgagggtgcaacaggaggcgttgccgggctgcgtctggaggaggccagggcgagagtgcacgttgaaggctgtgcgggttatttataaatagtggttctcaaatggtagcttttaaagatttcatattgaccgacaggaactaaagtctacgtgattgcttcctcattccttcatcgttcggcctcctccacctgggcacctgccacaggccatgtgcgtccatgtccaggtctgtctgtgccgacatctgctctttgggcatcagcctctggaaagtgtccctgtcagagtctccacgtgtctcactctccgcacccagacagtctctggagttgcctttgtagaggcaaggttgtaggggaattggaaaggcggaggtattttgactgaatttattggtaactttaacagcacaattcttgaattcaatttctttttattttatttatttattttttttgagatggagtctcgctctgtcacccagactggagtgcagtggcacaatctcggctcactgcaagctttgcctcctgggttcacgccattctcctgactcagcctcccaagtagctgggcctacaggcgcccaccaccgcgcccggctatttttttgtatttttagtagagatggggtttcaccatgttagccaggatggtctcgatctcctgacctcgtgatccacccgcctcggcctcccaaagtgctgggattacaggcatgagccaccgcgcccagcccttgaattcaatttctacacatgaaacattgcctcttagaactgaatgtttaaaaagaatttctaaggagtgaggtaaagaaaaagaattcctaaggggcgagataggctaataaacaatgtttacttagagtccgcttggtttcaatgatcagaaatagccgctaggttggtgcaataacgtatattcaaatctcttggccaggcgcagtggctcacgcctgtaatcccagcactttgggaggccgaggcaggtggatcagctgaggtcaggagttcaagaccagcctggccaaattggcgaaaccccatctctattaaaagtacacaaattagctgggcatggtggcgggcgcctgtaatcccagctactcagaaggctgaggcaggcgaatcatttgaacccaggaggcggaggttgcagtgagctgaggtcgtgccactgcactccagcctgggcgagaggagcgagactccgtctccaaacaaacaaaaaaaccctgtttatttcagacattaagttttgggctgcaatattgaagattttagcatatcggtcacttttctgctatgcatagtattagtttcaaaaggtctgagaaaacgttcactctcttgtgtttcataagttatctgaaagtttcacagtttatcacaatttggaataagatcagctaacccccagcacagtaacaggtggactctgtcttctctttcgcagacacgagtcctctgccaggctcagtagcgattcctcctgcgtttgaatgccctttgctcttgtggctctggtacctgaggggttcgggccccggcagtgttgggggaacagtgcaggcttttgacagctcccaggtcctgtagtggggccatctctgggctctggagccagactgtccgcgggcgctggtgggccctttggggtgatggtgaacatagtctctaaggcgttgtaccgaaccccagcatagcgagacgtgtaaggtggtagccgtggggtcttccccgagcttcccgctgccatcacctcctgggaagacggatagcaaagaagccgagggtgtcgagttgccccatggtttgtaaaacactggcatgggctggaacggctcaggactgactgccactgcgtctccctgtaagcccctccctttctggggagggaagccccccaacaacccacagccagcctcgaagccacgtcgccctggctctggttcccgctaacccttgctggggagtcccccgcacaacctgtcctgctgtttcctgctgtttctggagctagacaagcctcagctggcctcctggctcccggcatgggtgtcaggccctggggagtctccagtccctcctgtgggtactgggctgggctggctctgaagggtcttgaagaacgtggctgtgtgcctccctggcattcgcggtggtggctctggagcttgcgtttggctgagcaggccagcaggtgactcgcgcaagccagacggtccccaggaagccctcagctgtggtgggagatgggagatgggctatggtgggagatgggctgtggcgggagatgggctgtggcgggagatgggctgtggcgggagatgggctgtggtgggagatgggagatgggctgtggtgggagatgggagatgggctgtggtgggagatgggctgtggtgggagatgggagatgggctgtggtgggagatgggnnnnnnnnnnnnnnnnnnnnnnnnnnnnnnnnnnnnnnnnnnnnnnnnnnnnnnnnnnnnnnnnnnnnnnnnnnnnnnnnnnnnnnnnnnnnnnnnnnnnnnnnnnnnnnnnnnnnnnnnnnnnnnnnnnnnnnnnnnnnnnnnnnnnnnnnnnnnnnnnnnnnnnnnnnnnnnnnnnnnnnnnnnnnnnnnnnnnnnnnnnnnnnnnnnnnnnnnnnnnnnnnnnnnnnnnnnnnnnnnnnnnnnnnnnnnnnnnnnnnnnnnnnnnnnnnnnnnnnnnnnnnnnnnnnnnnnnnnnnnnnnnnnnnnnnnnnnnnnnnnnnnnnnnnnnnnnnnnnnnnnnnnnnnnnnnnnnnnnnnnnnnnnnnnnnnnnnnnnnnnnnnnnnnnnnnnnnnnnnnnnnnnnnnnnnnnnnnnnnnnnnnnnnnnnnnnnnnnnnnnnnnnnnnnnnnnnnnnnnnnnnnnnnnnnnnnnnnnnnnnnnnnnnnnnnnnnnnnnnnnnnnnnnnnnnnnnnnnnnnnnnnnnnnnnnnnnnnnnnnnnnnnnnnnnnnnnnnnnnnnnnnnnnnnnnnnnnnnnnnnnnnnnnnnnnnnnnnnnnnnnnnnnnnnnnnnnnnnnnnnnnnnnnnnnnnnnnnnnnnnnnnnnnnnnnnnnnnnnnnnnnnnnnnnnnnnnnnnnnnnnnnnnnnnnnnnnnnnnnnnnnnnnnnnnnnnnnnnnnnnnnnnnnnnnnnnnnnnnnnnnnnnnnnnnnnnnnnnnnnnnnnnnnnnnnnnnnnnnnnnnnnnnnnnnnnnnnnnnnnnnnnnnnnnnnnnnnnnnnnnnnnnnnnnnnnnnnnnnnnnnnnnnnnnnnnnnnnnnnnnnnnnnnnnnnnnnnnnnnnnnnnnnnnnnnnnnnnnnnnnnnnnnnnnnnnnnnnnnnnnnnnnnnnnnnnnnnnnnnnnnnnnnnnnnnnnnnnnnnnnnnnnnnnnnnnnnnnnnnnnnnnnnnnnnnnnnnnnnnnnnnnnnnnnnnnnnnnnnnnnnnnnnnnnnnnnnnatgggctgtggtgggagatgggagatgggctataccaggagatgggctgtggcgggagatgggctatggctgggcctgtcctctgtggtgctgtggatgcgtcctattcaggagctgcctaccaagtttcattgcgatgttggaatctgtccttggtccctgccaccatggggtgggtggagcccccagcaccctgccttcttcctccccttcctgtgggtctgcagggctcggggtgttgatggagactgtgggggtcgggggagccagcagtttcgttgtgtgatggcaggaagaatccgcgtgctgccccaccatgccttgcgacgctctgtggtagggagctgtcgggtcacagtcaggcgcttaacggccacccgactgtggacgcagctgaggccatttgtccagggtggcctagtcacaaccaacagaactggactctgccatgatgagcagaccccgcaacctacactccagactccaccggtgctgggaccccgactcccaggagacctggcgagctcagccctcttgtcacaaggcctgtacggggtgggggcacgtgtcacggggaccctcggcccagactggccttctgctctcgtcaccaagatgtggagccttctggggtcagagcccagtcgaggggctttacgcagcctgtggtgtccttggagccacagctccctggagaaggcactgcgtctgccagcctccgctggtgaggggctcagagttgagaagatcatgcctcctgattgcacgagcaccctggtcttggctcatttgctccttcttgagccgcttcggtagcatttggcagcccacggttttctgcctgcgttgtttagtttgtttctgctgttatggagttcacagctgacacttggagggcggggtttgcaacaccagtttctgatgggaaggactggtgtgagggtgtgaggaggctgcggaggccgagggcctgtgcgttctcccaggcgtgtgtggaagggctggggcatcttctccctggtccttctcaatgttactctgtccatgtctgttgttagccatgaggaggagaaggcactctgttcctggaaaggagaaaacaacgtggctttttgctcagatatttttttttgagccagggtcttgctctgttgtccaggctggagtgcagggtgtcatcacagcttactgcagcctcgacctcctgggctcaggtgaccctcccacctcagcctgccgagtagctgggaccacagacgtgcggcaccacacctggctaattgtttaagttttgtggagacagagtcttgccgtgttgtccagggctgatctggaactcctggcctgaagcagtcctcccgacctgtcctctcaaagtgctggcattgcaggtgtgagccagagttttacagtcagatcatggagatctgaaatgttgccccatctcaccgaagaccgagtgcccgggagcccccctaggagggtcagaacctgcccgggagccccctaggagggtcagaacctgcccgggagcccccctaggagggccggcacctgcctgcccgggagcccccctaggagggccggcacctgcctgcccgggagcccccctaggagggccggcacctgcctgcccgggagcccccctaggagggtcagaacctgcctggttagctcagatgcccccgtggagacagcgtgagggcggcagggagctggaaaccttcccaggttcccaattttgagatttcctaagctgcctgtggtccagctgggaggaagtgtctggtcctgatgtgcgtcggtgaccacagacaaaacaggatttgctcctgcgccaacgttggcttttgagcagcgggataggtgggcctggtggtaggtgcttcggcagccgggcagccgcagggacttcctccctcgggattaaacctgagtcgggagttggagggcaacagttattcacattcaaaaccagatcttaagtgcaaattaacgttttttggattcttgagcaaaatgttttctacattatgatgggattttcttttttataagtgcttctagaacatctctggaagctgggttagacgcacagggcttagtcggctttggggagagacagtagttgtaaaggccacaccggacgccgtgtgcacctcccaaggtttcccatgtgagaccatgtggcctgcatgctgcgttccatcagcactgggctgtgcgacagatgtgtttccaggcgaggttgctgcagaggggaagagggggacgtgtttccaggcgacgtcgctgcagagaggaagagggggacgcgtttccaggtgacgtcgctgcagagaggaagagggggacacgtttccaggcgacgtcgctgcagagaggaagagggggacgcgtttccaggcgacgtcgctgcagagaggaagagggggacacgtttccaggtgacgtcgctgcagagaggaaggagggtcgcgtttccaggcgaggtcgctgcagaggggaagagggggacgcctttccaggtgacttcgctgcagagaggaagagggggacgcctttccaggtgacttcgctgcagagaggaagaggcagacgcatttccaggcgaggtcactgcaaagaggaagagggggatgcgtttccaggtgacatcgctacagacaggaagagggggatgcgtttccgggagacgtcgctgcagaggggaagaggtggatgcgtttccaggcaaggtcgctgcagagaggaagagggggtcgcatttccaggcagcatggctgcagagaggaagaggaggacgtgtttccaggcgacgttgctgcagagaggaagaggaggacgcgtttccaggcgatgtcgttgcagagggcaagaggggaacgcgtttccaggtgacgtcgctgcagaggggaagaggcggatgcgtttccaggtgacattgctgcagagaggaagaggaagatgcttttccaggcgacgttgctgcagagaggaagagggtgggacgcatttccaggagacgtcgctgaagaggggaagagggaggcccctccagcagggccacctagatgtttgctttgccccgcgtggagtcatattccaggaacccccgaacccacctgcagcttgattctgctcctcagggccagaggttctagtttatgggaggagtgttttctcactggaaacatggagcccacacacacttctacgctggaagccgtgatgtgtgtcaggaacgtgttctgatgttggtgtgcaaaatcagtattgtgcctttgtcccctctgacccccatcacggcagttctgaggcttgtggggcaccccagctcctctccctctgcacaggccactgttcccagaactcgagggttccctgacaccaagatgacatgtggcacagacctggaatcacgaggaaatgcccgtcctcctcccacgggcagacaggtcgagtgtgtttccagagaccgggccgtccgtggggcagtagcgcctggatgacgtctgctttcgcctggagccctggctgcaaggggcggtgccgggcaagggccaccccaggggtctgggagtgcagtgtcgggcctgtggaggtggagagcagggatcagcctctttttgtggatgaggaaatggagacacgtggaaacttctggtaagaagctgtcaagcctccaggtttcggttctggacaggtgcggggcaggtattggagcactttgggctctgaggtccacgtggcccagcggcctccaggagtcagctgcaaggcggagtccctgtccacaagctgcgttgcaggcacagagaccaggagagggctgtgaagcaactctgtgtttactgggctgaagcagcagctcttggcagtgccgccaccatgggctgtgtcctgtccccgtggcgacatcacagctgagcgcgaagctggaagcttgggcacgtcttggtgctgggtcttctccgaccccgagggccaagggtgctctgtagctccaggcgtcagagtctgagcatcctttgttttggcaacatccaggacaggagtctttggagagtaacacatccttattttgaaagagccctttaggtgatttgagaaaccgctgtatttgttgtagctccaagtattacccgtgaatcacctaggctgctcttcagtgaacatccagaatgccgtcagttcttgtgaaacccccaagtttcccgtaggtccaagctgagaagattgagtgaactctgagagctgagccgggccgtcttggcaccactagaaacggaatcagttccatgactgatctgtgccccaccccacattaacttgtgcaatatgacatttctggttttggtttttgttttataagccatccatggcaagtgcagtcggaggccccccactgccaaaacttcctgtgagtaataatgacagatgggccctgaccctggagacgtctgagaaggtgtttggggtccgagaagagtccgcgtgtgcagtgactggaacctgtccctggtgtgaacttggggatgagtgggtgacgggggtggtgggggcctggggcacttccccgccctccggaccacactgttgctctccagccacgagaagatgcagcggcccccggctgcagcagctactgtcccggagggcaggggagtgagggagagggagggtgtacggcatggggcctgctgcctggggcgctgggatcccacagcgaggccctgttcccactgcccaggggcactgagatcccacagggaggcccggttcccactgagcttgggttcccaacgggctccttttgcttcccaagcaccctctcccacccttgagctgcaaggaatgtttcagagccatggaaggtgctttctcccatctgtagtttttctgggagggagaaaggctgacatcgggggctttgtagaaagcgtgctctggcccacacgttaacatttgggaggaggcctacagggagctgtcggctctgggcgagggctgggggctgcctcgggggcgggggttcagggtcttgagctcagcttctcacccatccggggcagggcagggcagatagaggggtggggacagtgttgggggctgctgggcctgggatggcagggcctgtgtccaaagctgttgtgaggctcacgagatacaggggtggacctgggagggttggggcgcgtacagaggggatgacttcgatttttccaaagaacagggaagggtctgtgtcctggtcgtactccaatcccgtgtggtggagccacgggacgccatcagtttttatgaaatccccaaatgtgtcctttaaaacaaaacctctgcactccggcctcacagcccagatcccgcgcgctcccggtctgtggctttgactttggtttgagttcctgggctgggcttacctggctggcagggccgcagctgtggcactccctgtctggggacggaggctgcccatgcacccggctgtccaccttcttcccaaaggcggcgtcctgggctccctcccatgcggacccgggatccacttgcccagccttggggaggacagatggggacagcagatcctgccccagggtcattgcccgtggccacatcggtcctgggaactgtgggtaggccatgggccgctggtgcctgcaccactgtcctggtggaaggggctggacctgggactgcctgggacaagaggccaaggcacagatggctgcaggggctgcccctgcatcctgagcctcacccggcgggcaggagggccgggctgggtgtccccatctttctgttcccaccctggccccagtcacctgcttctcatccaccgattccatctttcctgctggcttgtgaggcccgtgccctcctctgggccgccttccctcccatgggcacagagcttgggtcccacgtggagaggaggccctgcccgcagcctcagagtcaggcggccttggcttcagggagggttggacgggagccagcccattggacagtagcccggggcctctgggtgaccctccagggtgggacagcagtggtcccaggcccccctctgactcctgaaatcctaaggttgcccgggccgccgagccctccctccactccccggcctgctgggcaggattttgtgaaaggccttgtcttgggtcgtggaagaaaaccacgtggtctgtggggtcatccctggggcaggctgtgggagggtgaaggctgcgtccagcggccaggcccagccagaggtcgggaatcatgtcgggggtgacgcacagatgccgccgcactatcaccgagaaacgcggcgtgtgcgggcccacctggcctctttaggccgggctccgggctgccctccaggaaggccgacctctcctgggcgggcaaaactttctcagggccgagttctgccggcacaggtcagggggcaaagctggcctccgaggagcctctgaccgctggccactgtgtggtcttggggcagctccagacacacaagcccagaagacccagaggctgcctcacgtcggagaaatgcgctgatcgtctctctctctctttgtctctccatctctgtctctctccgtctctgtctgtctctccatctctgtctccctgtctctctctctgtctctgtctctctctgtctctgtctctccatctctttctctgtctctctctgtctctccgtctgtctctctgtctctccgtctgtctctctgtctctctttccgtctctgtctctccatctctgtctctgtccctgtctctgtctctctgtgtttctctgtgtctgtctctgtctctctccgtctctgtctgtgtctgtccctgtctctgtttctctgtctctctctgtctctctgtctctgactctctgtgtctgtctgtctctgtctctctgtctctctccatctctgtctctgtttctctgtctctctctgtctctccatctctgtctctttctccatctctgtttctccatttctctgtcgctctgtctctctgtgtctctctctgtctctgcctctctgtgtctgtctctccgtctctgtctctctgtctctctgtgtctatctctgtgtctgtctctctctctgtctccatctctctccatctctctctccgtctctgtttctctctctgtttctctctctgtctctccatctctgtctctccatctctctgtctctgtcgctctgtctctctctgtctctgcctctctgtgtctctctccgtctctgtctctccatctgtctctctgtctctgtctctctgtttctctccctgtctctgtctctctgtttctctccctgtctctgtctctctgtttctctccctgtctctgtctctctctctgtctgtctttctttctcactctctttctcttttaactaagggaaaagccgtcacacaaccaaatggccatgaggcccgcggctgccggctgaggagggctgcgggaggaccctgaaaccctcgccctcctgaagctgctcctgtggagtcctgtgggcgggtgtggccctgccgagttcagagtctgtcgcttcgtctgtctggaaactgcaggagtcatgagcagccttcacggttttcacctaagcaatgagcacgtgcgggctttaaccctcggaaaatcagaattaaaggattttacccaaaccacttaaacaaaggaactgcctctgctctgggcttctgctgccgagggcgcgattccgggattctcatcgttcaccggcggagtcggggcgactcatgaggagagtgttttcagatgctggggacgtggcctttctaagggagagggacatggcagggcctcaggctcagctctttggaaactgaagcccattcaccaggtgggcgggggaggagctgggcagaggttgagacacaagacctgagagcagagcaaagtttctcatttttttggttgtacaaataacaaacaccgttcactgtagaagacttttaaacacagataaaccacgataaatgagtcctgcaccagcgtggcagctcacacctggaatcccagcgctttgggaggccgaggcaccaggatcgctggagcccaggagtttgagaccgccctgggcaacatggagagaccccatctctacacaaaatataacaattagccaggtgtggtggtgcgcctgtggtcccagctgctcgggaggctgaggtgggaggatcccgtgaggccactgcactctagcctgggtgacagagcgagaccctgtctcagaaaaaagaattcgataatcctgcgattgagaatcagacagtgatcatttcaggatatgtctttttttttttttcctccccctctgtcccagcgcagacggcatctctgtcgcgagctttcggctgaaaaaaaatccctcacgcccttcccaggcgagggagacacaggttcaggggcatgaacggctcctcccgtggaaaggactgtgtggccggctccccaggccacgggggccactgtcctccatgccacgtcccatgccgcttccaccgcagcgtgaggacagcaggacctgagccacgagccacactgctgtgggacccgtgtcgggactcgcagggcctggcaggtgtttccatttgacctgtgggctcacactcggcagttctgggccccctggtgtccacctccatgggagcaccgtccccggacccccagaggggcggcaaacacaggagtcctggggagtgttgccggggcgggaagcccggacccccctgtgactcagctgcagcctctctgggtgttgctgcgggtgtggaggttgcatctggctcagtgagaagcatttttaaacttgattctgcagccactgcagattcgcgggaagctggggggaggcaatgccccacccggcccccggggctgccccatagcagccaccatgccctggccccaggccccaggaggaggatcctgccgggagcgccttgcattttgcctaggaccttcttaactctccagactcatcagggaagctctgcaggagctcaggataaacaggtccttggcttgaagcctgccggcatgggttgggaatggtgggggctccatgtctgcagcagccacggcagaagctgtggccacatgagctgggctctgggtgcggctgtggccattgaggagggagcatgtcccgggttcttaggttaagtgcgtcttggcaggggggcccggggctgcagcccttcgtgtacccacgtgtccgatgtctctgtgccatgccgtgacgttgtccttcacgtaaagttttcaagacccacgtcccattgtctgtgaaatcacaaggttttactttatggactgtgtggaatggacccagggaagggggaccagtatatgcccaatttgccagcatgtgcaacagtgaacttccctggacagctggccttggtgtggcagtgggtgctgtacggctggcctctgtgcagtgggttggggggagctggatggctggcctctgtgcggtgggtgggggggagctggacggctggcctctgtgcggtgggtgggggctgtaccactggcctctgtgcggtgggtcgggggaagctggacggctggcctctgtgcagtgggtggggggagctggacggctggcctctgtgcagtgggtcggggggagctggatggctggcctctgtgcagcgggtgggggagagctggacagctggcctctgtgcggtggaggctggacggctggcctctgtgtggtgtgggggctggatggctggcctctgtgcagtgggtggggttgggggggtgctggacggctggcctctgtgcagtgggtgggggggtgctggacggctggtctttgtgcagtgagggggctggacaactgccctctgtgcaggggtcggggggagctggatggctggcctctgtggggtgggtgtagggggagctggacggctggcctctgtgcagtgagtcggggaggggggtggctagacagctggcctctgtgtggtggcagggctggacagctggcctctgtgcagtgggtggcgggggggtgctggacggctggcctctatgtagtcggggaggctggatgactggcctctgtgcagtgggggcaggcgctggatgactggcctctatgcagtgggtcggggggcctggacagctggcctctgtgcggtgggttgggggggcctggacgtctggcttctgtgcggtgcgggggccggcctcgggccggtgggcaggctggaaggtcagccaggccctgtggtgtctttagtgagaaacaggaaataaatcaaggggatgttgtagaagttttaccgctgctggtttagaagtgtttgtttttattatttgtatataatgtgttgttttcagtcttgcactggtgtttttaactatcgtgtaaagatgcaaacagcaggccagaaaactgccttgatatatcacattggcaaagaccaagcgcaccccggaccctagtgggtgagccggacccattggcagtggcctttgtggtgcctccagggagcctcacgatgctcacgcctctgaccagtggttctgcgctcagggcatgaccggagatgtggtctgggagttggttgtgtggatgtttgcgttgccagcgtttacaacaacagaggggaacagcccacagcccagcagtacaatgaggatggtccttgtgataaatgggatgctgtgattagattgtttctgaataagctaaaatgctcaaaatgtgatctttcttttataaaaaggccaggtatggtgatacgtgcctgtaaccccagcactttgggaggctgaggtgggaggatcccttgagcccaggagttggagaatgcagtgagctgtgatcacaccctctagcctaggcagcagagcgagaccttgttctaagaaataaaaagagaaaaagaaaagacaaagtaccaaattatgtgtctcattttcttaagatgtatcattttgtaaaaatgtttatagaaatacacccagtgggctgggcacagtggctcacgcctgtaatcccagcactttgggaggctgaagcgggcggatcacctgaggtcaggagttcgagaccagcctggccaacatggtgaaactgtgtctctactaaaaatacaaaaaattagccggtgtggtggtgggcacctgtactcccagctactctggaggctgaggcaggagcattgcttgaacctgggaggcggaggctgcagtgagccgagatggctccactgcactccagcctgggccacagagcgggactccgtctcaaaaaaaaaaaaaaaaaaaatggagagagagagaaacagagaaaaacaccctttggctctgtgggcgtcggtcaccgtccagaccgggtggacgttcgtcggtcaccatccagaccaggtggatgttggatgcaaatttcacccgagcttttttttttattttttcagttgtgttgagtgtcacttttttaaaaaattgacttatgttgaagatgagtttgaagttgttggaattatctcagtcctgagcttagggcttcagcaagcgagttgccgttccgggggatgggctggtcagagacccccgactgaagcacgcctgcccgaggctgccccaggcgtcgtcccccagaaggaagcacgcggagtggagtggggtggagagcaggcagcagcggtcccgtctccgcagcagtgcaggctcctttcccgctcatttgggctcttttgtctgaaccagagacacagatttgtagagctgccaaattcatgctgaaaatttctaaccaaaaccaatcatcttaattgtctggattatgatatttattttgtaaaccattcttgctgtaagccatgcacacactgtgtcactaaatctgcaaatgattccagagccaaatgcagtcctgcaccgcggcgtcgggtcaacggcggacttcacctatgagggttctcgtgagatcgtgagagcgtagttttactgcatcttttccatgtttaaatgtgtttagattcacaaactgtgaccgctgtggggcagtcacccacggtgttcagtgcagccacatgccgtgcagacgtgtactggggagccgtgggccacgccacgtggctagggtgtgcactggacacaccgagtcggttcacacgagttcccacgacgacaaaatggcctaaggacgcgtttttcagaatgtgtccttgtcataaagtgacacgtggctgcgtttacacaaacttattcttatgtaatagtcagctgcagagtggtttagactgccttatctttaggaaatgtgtctgcctttaaccagaccagcggtggggggaggcggcttttcttttcttctttcctcctctctcctctctctcgctgtctcttctctgtctcttaactttcctgggaatccagtgagcccagttttttcactgtgaattttgtttttggtttgtttgttttgagatggagtctcactctgttgcccaggctggattgcagtggtgcaatttcggctcactgcagcctccgcctcccaggttcaagcaattctcctgcttcaccctcccaagtggctaggattacaggcactcgccaccatgcccagctaatttttgtatttttagtggagacggggtttcaccctgttggccaggatggtcttggtctcctgacctcaggtgatctgtctgcctcggcctcccaaagtgctgggattacaggcatgagccaccacgcccggccatgaattttgtttttcatttgtttctttttcaattcatagcaaaagataggtgcaaggtgcctgagacgggcaccgcctcgcatcatctgcgactttgtttggtgcctgcctgtccaggagcaggtgtggccactgcagaggggcccttcattgcccagccctgcagctgccccctctcccttccccagaaactcacagctggccgcgagctctgtgcagagaagtctttctctggaggctcttgtccttcctgtgtggaggcctgggtccagccgcctttccttctgcctggcagcgttagctgatactgggtgtccatgctgatcacctcacgtgggaaacagctctgacagtacagcccatgaagctgcgtcttggagattcctctgtcagggaagctgtcgtggctgagttggggtccagcaggcacccgcagggcccaaaaccccacagagcggaggtgggtggtgagcctgccaggtgcatctttggataaatccatttctgagttttcaaattactatgaagcttccaatgtcacaaaatatgtagtcttgttcttgctaaggaacattttaggtgtttgtatttttaaaaattacgtagttgattccattcaagctgcctcctgggctttttcctctttaaacgagtcttctattctgcccatcgtttttagtttgtttgttttgagacagagtcttgccctgtcgcccaggctgaagcacatgcgatcttggctcactgccatctcaacctcccctggctcaggcgatcctccccgctcagcctcctgtgtggctgggatcctccccactcagcctcctgtgtggctgggatcacagatgtgcaccaccacgtcctgctcatgtttttattttttgtttcgtagagatggggtctctccatgttgcccaggctggtctcgaactcctgagctcaagtgatctgttccccttggcctcccaaagttttgggattacaggcatgagccactgcgactggccttgtttttgttgttgtttgttgtttttttttagatggagtctcgctctgtcgccaaggctggagtgcagtggcgcgatctcggctcactgcaacctcctcctcttcggtataagcaattctcctccctcagcctctcgagtagctgggactacaggcctccgccaccacgcccggctaatttttgtatttttagtagagacagggtttcaccatgttggccaggatggtctcaatctcctgaccttgtgatccacccgcctcggcctccccgagtgctggggttacaggcgtgagccaccatgcccggcccttgttttgtttttaagtcactttgggttcacagtgtgtcctgaggtgtgggggccttcggggggctcgggaggcagtttcctttaacttgcagatgcccctgctctgcgactgcatcgcatggaacctgcccttctcgagaagctgccccgcatgtcccatgtctctggggcttgtacttaaaactgacgtagaatgatggtcagcagctctaggcaataattgagtcctggccagaggggctggttctgaagatgggggagtcacaggccctgtgtggagggtgacctcaggagccccggcccacggtgctcggggtgagcctgtgtggtgaggacagtcggcgggccctgggtctctgcccacacggaggtgaggacggtcggcgggccctgggtctctggccacatagcggtgaggacagccgttgggccctggactgcctctgcccacgcagggtcttgcacctgatctgatgagcagtgctggtccagggagggtcccaccgcatcctccgcctgccttggcccctgcagtaggcagtgctggggagacagactgagcgggagaggaggctgggccggggctgcagcggccacagagccttggccctcccagaaacggactctgatggcagaggcgccggcctcttgcacagggtggaaggtggtgcctgcgtggatggtggtgcaccggggcaggccaccccctagatgcaagaaccccttgggtgcaccgtgtggcccccaggagtgttgagacagtctgcctgggcctcctacagaacacagttgggaagacacgccgagggcacgggcaggacctcaccttagcctttcacaccaaacattcatctcctgaaaagacaggggccgtggggcccccagctgggctgtaggctctgaggacagccccagcacctgtcacccgccaggtcatgcagctcgtgtccctctgtgcaaagtaaccgaacagcctcccacagccctcaccgtcgtaccccgccctgctgcgtttgctcccaccgccctccatggacgccgtgtccctcctcctggccctcagtcagggccttctgtttgtcttgcagcaatcatggaatttgggggctggcggcgctgcgcacatcacaacttccaaacccactattttataaagggcccagtcagtcacctgtctcatggcagccacacagctggttcatagcgaggagaggtttgagcttcctggttcttaggccacagcccatccctcttagattttaaaacagattttcaatgagttctaaaacctgtcttactggagggttaagtaactgatagaagcctgtcatgaaggaagagaagcgtgttaaggttgtgcttggaaaatgtttccatcttagagaactggccgggccgtggccacaggtcacgatgagtaagcactgcattgacacaggcttctccatctccatgtcaggacgtgcactcgccgatgaagtgtccacccaagatggcgacgggtgagcacgggcacgtgtggcccgggcgaggtctgtgtggtgctgaacgcctcctctgctctgttcccttccagcccgaccctgcccgccctggactggcagctgccgtcccactcaggcccgtatgagcttcggattgaggtgcagcccaagtcccaccaccgagcccactacgagacggagggcagccggggggccgtgaaggcgtcggccggaggacaccccatcgtgcaggtaggcactgcggccagactcgcacgtcacttggtgcttttgtggtcaaaaagtaactttggagccacagctaactgtgcttagactctcccagccaggccagctgaatgctctgtcgtggttagtcccgggcggctgctcaccgcctctgagctggaatgggagcatgccacagctcctcctgcttccacacgtgcaggccctctctcgttgttttcagatttgcccgaagcagctctcgtatccgtggatgctgcctgtggtgtggatgttttgggggttgattctcccctctctaaagcctctgaacttggaggcaggagttctcaccagcagcaccagcctcgcctggtgggggaccctcagaaatgcaggttctgtggcccacccaggcttgcaggatcccatactctgggcttgggtgctggggggcaccagggctcaaggtgctccccgaggagaggaggagtggcttccagagcgggcctgggcctggcagccacatccctgccggggtaggcctgggcctggcaaccctgcagccgcgtccctgctggggtgggcctgactcccccgggctgtggtgtggcttcctcaccttcctcacaccttgcgggaaagccacgtggagttaggctgtcgagggaggggtgtaatgaccgcgccagggacgggcagcgtctgcacagagccatgctccctctgcaccccaggtgttgatgtggatcccgggtagccgtgggtgttggcattttcttcgttccacctgttacctcgtcagctataggccccaggccctagatctgctgctttggcagccacagagcagcaagtgtgtccagccccagggctccaggctacgcggcagcacagaggatgttttccgagcacaccccaacagcaaaaaaccgggtgccccagccccgttatttagggaatgatgcaagccggaaggggtgttcagcagagtgcctcgtatttttattttcttccatttagataaatagtggagagaaggtggccgcagggacaaatggctgtttgccaacgcagcagccggcggcagggaattagcgggcagggcgctggggtgaggcgttttcgccagcacttgcagatgatgttaatgtgatgtttgtggcctgtgtgcttgatgccaattagtacctccctcgttggtgcttgaagcaaggaaatgcgggagacacctgagcgcacagtggcccgtttgacatttaaagtctccaccctcccaggtgggaaaggtcagacagcgctgcaccacgctccgtcactgcaggcctgcacctccccatccctgcctcggtttttactgaccgaaagcttgttattgctcagtgggaaggatattagataggacaagaaacgaggctgtgaaaggaggagtggaaataaagcaatagagaaataatggcccagtccaccctatttgctgtaaattatgtcggtgaggggcactgacgtcgcccttttcactgtatctggatgaggggcgggtgtaggaatcgaggctgttacttggagggtaaagcaggaccatgagtgtggagagagctctgaggtttctgtttgttttgttttttggtttgtttgttttttttttttttttgagacggagtctcgctctcacccgggctggagtgcagtggtgtgatctcagctcactgcaacctctgtctcctgggttcaagtgattctcctgcctcagcctcccgagtagctgggactacaggcagccctgggttttaatggatgtattttcacctgcctgtgagtagcgccggtgcctggtgccgcccgtctctgcggacacagctcagtgcttgggtactctccctgcgtcttctggaatcttctggaatcccgtctctggttctgccatctgggtgtcttgggctgagggtgcagaaatctatcaatacagatgccactgagaggatccaggtgttctggaggactcaggaaacttgaaacagtaattaaaaatatctttaaaatgtaccctcaacaattattccaaatcaagtggcccgtgtgtgcgcagcagcgacacgggagaggctggctctgcgtttccacagaaggagccctttccattgaaacgcgggagaaaacggtcccctgcacggagaacgtcaggagctgtcagcatatctcatttgtagaaattagtaatttaaagagttttgtgatgtatctgtggcagagtggatttctgtctctgcaagtgtgaggtaaaagcagctaaaaagagggggttttgggggttagttttctctttcagttggtggaccacaaattggataaaaatagaatttgtgcataatttaaaaacaaacgagaatagaaagctctcagttgccgtggaagctcctcgtaaccgcagacgtgccctcggtgccgtcgggttattttagtacatcctttgacgcggcccctttcccgcttttcagaaacgaggctcatcgcactggcctgggggcgcgaggacgaggccgtgggtagtgggcgctgcgggcggctggtcagagccactgggagccgttgggaacaactggcgcgggagtttcctgcatttgagaaatgctgttctcttcgttgtgaatcgtctgtccgctgcatctcaaaaagcttgtccagaaaattaaagcccgctgtctcctgcagtgcagctgagccctggagggtggcggggggccgggggatgtgggtgtcagctctcgcggccaggggcacgctgtgcccccgcgcccggtatccccgtcctcccgcacccggcgtccgcgtcctcccacgcccgctgtctccgtcctccccatccccatgtgtttcgcagttgggaagtgaagcacgtgagcagaacgcagcaccttctctccaggaagcattcggagcatggactctgggttaggaaagggtgtttgctcctctggataggtgctcgctcttacttgtgggtgctgaggggcgtgagggggtccggcatccgggtacctgtgggcgctgaggggcgtgagggggtccggcatccggggcttctcccatttagggcctttccttcagagggaaggaggccagccccctccagtgagcactgagcgtgccccctgccgtctctgtggggatgtcattgttcccacgccggggagagaccaccccaggccagcccctattcttctggccacattgccatgatcacaccgtccgcaccctgaggccacccccattacggctgccacggcgctaaaaacaccagcatcaaagcaacagggccgtggtttagcctggaagagcggggccctggagccgtctgcgagggggtctgggtggttcaggatggccggcagcccctggtggacgtggtccctgcggggtctggcgggacctcggccatggtgatgggtgcgccccctctgcagggtggggcctgcgggtaaggacagtcccgccccctgtgcgtgtgaggggatagtggagagaggggtctggcgtgggcctcactgctcctgggaaaccaaagatgaagacgcctgcttaggactcaccttgccctggtagaacaagtgactcagacagagcctcccagaggcttctggccaggcagggagtgaccagcagcgcagccagcctcagctcctgcccacacagcccccttgtcaccggctcctcctgcccctgctccagcaccttggccaccagttctcggtgggccggtctggatctgccgatgccgggacctcgccaggccgctggttgcaggggaggctgagggggcgtccgcctgctgtctgcttctcaccagcatttccagtgaggcatgaaagtgatgcgtggcggatgtttccctctggcctcagctttcccccaaatcccagctcacactgagtgtcctgatggtggcacctcgggcagccgccaccctctgccctccaccctctgccctgacggcaggctctgcctgagggggagggtctctctgtacacacagtctcctcaccctggagggcctgctctgctctcaacggagctggaaccaggagttcgcgagtgctctgggtggctgctggcttttctccttgtctcacctcctcatccgcacacagcctctgccctcagcgctgctcacctcggtatgtaggcagccggcatcaggatggtctggggtgagacaggcagtgttcttccccttctctggccagggagggtggagaagcacccgggcacagccattgaggccttttcgtgcaactcattgcctttctgggcgtgaaggtggaggctggtcctccacctgcgtgttctccatctgggggactgtggtcccggaggagacctggagtccggctccccgctccgtccgaggaggagctgagcggcgtgagcagtgcccgccctggtcactctgccttgctttcctcctctctgtttctggttgtgcctccttccttccctcctgctctctttgccgtggactgcagccccctcgccagatgtgttcctcacatgagtcaacccgtccttggcctgcgtcctccactgctcgtggcagctacactctcccggaggtggccgggaagggcccagggccttgagaagatgtctttgcagcacgtccccggccctcggcctccacctccatggcacccaccatcccacgggggcacgtggacctctgtgggatatagcctgacctctgacccaggggtcaaataactcaggtctgtttaccaagtcaccaaaataacctgcccgatagcatctcacccatcacacgggaggccgggctcgtgtgaataattaataggtcactggaatgtgaaacgagaagcctcggcccgttctgaaacagcattttaggtttgcagcttataatattgtcagttaggagaagggccaactgagtctgcaaagaggtgagggcgggtggtctgggatcctgcctcagccgcgcgggtgagaggggcgggcgggtcaggcgaagactcagagtcaggaggccagactggccccagggagggctcctggccataccccaagctcaggacgcagggtggggcgggcccgctggtgcccacagtggccttggtgggcctctccttccattgcccagcttgtaggtcaactttgcctccacagatccgtaacagacgttttttctgtcatgtaagaaacttgacagctgaagaccaaggagtggagcctcccgtgaggcagctcttcttttccggttgttaaaatgcgcgtcgggccagtggttctgactaattctcactttgtgtggtaccttcagctggcaggggctcggggagtgttcagtaccgtgaggagcaggttcctgagagcccgtgaataccgtggacagattaccacagcacgcactgttccacgcagggcctcatccacgctttcttaagtggtttgccacacacaggagctcctggttctccatgtcccctgccaggcagggctgttaaactggaaagccggggagggacgtcgctgggacacattgttatctgatcagagctccgaggccccaccaggagctgtgctattgcagaacctcaaacagcagccgctccggccccgccccaggagccacgcagaggcccacgcacggggaggacgccgtggggtggaaactaaagtgcaggtctgaccacaaaaccacacgccacggcaccgctgctgccaaatgccggaggcctgcaggaggcacggattaattttttatgagtctgccttggaacctagacaacagccctctcctctttcagcacaatttcagggcgaatgaccgtcacttccctggactgctaagcgcataaacgcacagggaatttcctagttccacatacgccgttgttcccgcagcccatgcagctgggagagcacacatggttgccgtcgggctgtgtctgttttcccaggagcaagaactctcagaagtgcagtgttgaagcccgagccttccccgtgtcagcttttatgatgaacgaggattcaccatttatttctcccctaaagcaaagcccacgggctctgttttgagcgatggggacagatgctcggtgctgctgggaaggtgttcacggggcagattcgctgtgtcaggagaccaacgtggaatgaggtcggcccagccagtcactgcttaaaaacagtaatgacaatatttgagaaaatgggtggaattttgtggagatttactggcacggggaaggcgtgtggcctctggcaggtctgcgacactgatttctaactacctgttccacagctccactgcctggaaaaactggcaaaaatgtggcctgggtctcctgacaggcctggccattggagtgggggtgtgcagctgagacaggaaatacgaggcgcatgagtgtccccaagcccagatcctcagcctccaaaatcttctattagtaatttcagagctttggcttcttggtgctttgggaaaatttaagatgacgcgtgggctctggcacggccgttgctagtgacctctcctaatagcgcagaagggcctcccaggaggctttcctaggtagagaggggtctgcacgcccactggaacatgctctatcccagcctcagaaaacccacatttggtgcaggtgggacaggaggagtggacacgtcacctggagaccacatgagaagcggccatctgcagcagcaatcaccccgtggggaggcggcgccctggcagctctcatgtggggcctggtccttcctcgctgcctgagcaatgggccctgcttccccgcagacaccgtggtgcccctgggccacacccagcaggtgtccagtgaccgagggtggtgttggccatggcaggtccctgcccgtttctccgaggacctggggctgtgacccagctgggttctcccgggaaggagcggccactgtctgcactgtccagtgctgagggtggcagccatttctgaagcctcccaggtttgtgccctgctgtgtctgaacagctccggagtgcagggtctctgtgtcagtgccggttctaagaggaacgagatgtggtttcagagacactcctcttctctgaggagctgctgggcgggacggctgcttgctttctttgtctgtgacgttggtggctgttccttgcccaggccctgcccaggccagacgtgggagtggcggctgggagcacccatgggcgtgtgcccgtctgggctgggctcgtgtccgtggacctgcctcaagccacacctccctcctccaggcaggacaccgggccttgtctgtggacagaggcgctttgctgggaacagcacagatggcccctgggccctgcggagccgagacgcaccatcatacacacttggagcacatagactgaccaggtctcaccctgcgaggctccctgaggccatgtcctagggaaatagaaggtttcacccggagattggggagtgcagggctgtggcgctgcagggtgcgggccctgaaggaggggcaggggtgctgctggatggtggctcttccaccccaggattcctcgggcccttcacccctgtgtgtctggactgggtatcgctgtagctgtcgggctctggaggtgcacatggctgctgggcgggcagcgctcctgggcctctctcccccgtgatttcggttttgatgtgtttgagccactgaccagcaggcttaggggccattctggagctgggagggcttgtgggggaggcaggatgaacaggggctgcttgccggtcctcaggccaccctgccagctccttgatgtgtctccctgagatcagccagggcatcccggctgtgggtgggctgtgacctgagcccgtcaggccctgctggggtagactggggagaagtgctgagcggaaaccacctcacttctgacaaatgacaagcgctcctgccgcttggtgtcaggcgacgcgactctcagtggcacggatgtctctagaaggttgccgtttctcccttcgtggccgtgggctgtggattctgtgtgcttctggccctggggtcacggggttgcggcgtttcccacttgcctgtttcaggagttgcattctagatgattctctctccatagaaggtcgaggtttctcagcatggattaattgattagatttaattaaatctaaacgtggtgtttccgggcagaatcttcttcagccaaagtgagcgtggccgtctcttctctgggcgcttccaggtgcgttggggcccctgcaccctccacgtcagtgccctggctccgtggccctgtcggtgctctggtgagtctggggttcgtgccgagcgccattgcctccaggtcgaggtgggaagcgcgctggtggggcaaggtggtccctgcatggcacaggttgggagagcagccgggagggcagcgggccgaggcggtgggggagggcaccagttctccacggcaagcacggcctctggggctgctcttccggagagacgtggagacccgcgtgcacgtgtggagactggcacgtgtgaggggcccacaggtgtggccgggcggcctttctcctccccacctctgtccaccctcgccgaggcgtcggtcctgctgagcagcctctgctgccttcgtgcaggtgacagcgcacgtgccattcacgggcgccatgtctccaagaagaggggctcctgccgcgtgcctgttctggggttgccactcaacatccttccagcaccttctctgggcttccggtttgaatgatctttctccaaagtcggcggaaggggctagaaaagtagggacctgggaagaaagcccagacaccttggagccggggtccgggaaacaggccctggcagctcagcgctgcttctctggagtggggatacaatgttggttcacagacgtgcggtggcggcggcgggtggtggcagcagtgtgcggttgttggcgccacgtgctcacgctgggtccctcctggggagcttctgctccggcgggccacgccttgctgtagcctgcaggtcatctggttggtgtctgggggaggtctggggccccagcccggagctcagctctgagcatcaagaaacccgagtttctccccactcccacccagacagctccccactcccacccggacagctccccactcccacccggacagcagcagctgtgtttggaaggggacacaccagagcttcccttgtagcaagtgaggcacgctcagctggagcctggcagtcctgcagctccgcctgcccccttttgaaaaccaaaaatcccaagagacttatgttgaaacagcccttcccggtcaggactgagcctgtggctgagtgcagtttttcagtcgcggctggaaggtccctgtgcggggcggcgagtccctctagatttgctttacagccacaaattcagttttatctgtggatctgaacacgatctatgaatcactaggaaagcaactgtgttcacgggaaggattctcagaattgagctgacactccgtggtgtgaactcagtattgtcagcttgtgcaccgcgcgtatggacacacacctgcacgcactgtcacacacacttgcctcgggcccccacacacaccgccctgagagctaggaagacgaatcggtcagtcacacggattctgcagacagcttccttcaccaggcatggtagtgagggcagcgcccactactcacccagggcctctcgtgcaggaaactgcatggacacgtcgtcctgttcctgtcatgggaaggggcctggagccgtccctcggggggtggggaggagctagtttcccagtcggcgcccgtgcattcaccggtctgagaatccactcagcaggcttgctatgtaacctccgccgttcaggcctcagcatgcagcaagcccgtggggtcccgtctgcccagcctctgcctcggttcctgccgggcacatggacgcttcccttgaatccttctgccgacggcatctgtgggagggcaggtacgatcgatcctggtcctgtccccctagccctgggcgggtgtcccggcacctccaggcacaaggccccttccccaggctgcccagagaccccagccccgaggtgctggtccgcccaccctctctgggaagggctgtgccacatggcgaaagctgctgtgggtcctggtacctggtgtccctgcctgccagggctcatgatgccaacagtgccaggtttgtgggatttgggggtcaggagggcctggccctgctcctgcaaggccgagatctgttcccttggagggttgagggagtgttggctgtagggttcctggaggcctctctcatgcactctgggtctgtcaggaggctggcaactgtggccaaacaggtagaaataaaacctgaaatgagaaaaaaacttttttctagaacttcccagagagcagtgagctggtgccagtgggtcagaggcttgtcacatgtggtgtgtgtgtgtgcgtgtgtgtgtgcacgctctgggggggtgtgcacatttcccagtgtggctgtgcgtgtgtgtgtgcccacgtgtgttcacagaacaccaggctttgccccgactcctggctcaggcctgagtctccagccatggcgtccccgttcctcccgttccttctctgcactgcacactgggaaccaggacaagaggtgtgcggcgtcaggctgtgtccttcccccacccaccccgagcccacgctgctctggagggagaccccagcttcccccgcctaccccgagccctcgctgctctggagggagaccccaggcccctcaggccctttcccgcatctgaaggggccagggcagggcgtccggcagatgaagctgccccttaaagccaggtctgggccggtttacagggaagcactgctcacgtacaacctggcagaccacaccagcgccgcacacacaggcacccctgtgggcacccacgtgcccgaccccgcagaccacaccggcactgcacacacaggcacccccgtgggcacacacgtgcccgaccccacagaccacaccggcgctgcacacacaggcacccccgtggccacacacatgcctgcacacgcacacttctggtgcacacgcccacactcacggaggcttctgcacaccacacagccagcaggtgaggaagtggacgctgcgtggctgtctcttggtggcttcacctggaatgtcaccgtggaccccagagcccgaagccccggcaagcacagaaatcacaccggcagcctgtcccacttcgggcaggtgaggcctggctgagaaaagggggaaggagagggaggatgcgggggtgtgtcctggtcctccacccgtttcgggtttggggtgctcccttcgactactggctccatttttgatgtcttttacttttgtttcgatttttcctggtatcttgagtaaagtctccctggagcatcaaattggatttttcttacaagtaccgtgtgctgttgactcatctgctttggtgtgccgtgggtcacgtgggcctgggctgtgggtaaggtgggcctcgttcctgcaggaacacctggctctgcagcagtggctgccgtatcatcctggccaggcccctgtaccgagggtggagccacggggtctctgatgccttccttctcgtgctttggtggagaatgtggctggacgtcctcccatgacagatgcactctcctgcctggttccctggccccgggcccagccctgagagacgcaccacggccttcacctggaagtgtcacctctggctgctgttgtgggtgatgaggattccagggctgagaagaggaccctagacgctgttcacacagcgtggcaatctctcaaattaatccagcatggggggaatcggggttgaaaccggtttgtgagccggattttctgtccctgtgtacttccttggggcaatttgaaaaatgcagattttactcgtaggccctaaatggataatttccctttaggctgacggctgctcctgtgccctgcctggagagaagcctgactccaggtcgccttggctccgtttctgtgcagcagctcagactatggggtggagggtgagacattcccacccgtgagctgcctctgtccaccccacacctccctcccctgggtgcacgcagctgagttccacgttgaataaatttggcctcaatcatccactacccaccatgtcaccgtgtaagtgctgaggtcagcacaggagctaaaaacaaacattgtaacgtgtaggagactcagtagctcttatacctcggcagtggaataagaataatacattttgtttagttaaggttgaggcagagggaggtcattgttgtgacagggaattttataaataggattctgacaggttctgtactgtgccagaggcagaaagcccatgcagtggggcccgtgacgtatttaaatgacttttcttaaaatgaacttcatgttttaaataatagatgtttacctcccaggtgaaaccttaaatattcccattttcactgaaatggcatgttttttaaaggatacagtcataccccaaattcacagcattccacacaccatcagagaactgccacagggatcctgggggaattttaaattgtagttttaagaccacgtgaccctggagctgccccggtgcccctcccccaccccccgaggtggttttggtcagcgactcatttacatttttttctatgtaaattaaatttttaggtattaaatctcggaaaatggaatactgcgtggcagaatccgcctcttaatctgcttttctttttacatttcccatcataaagatgtttgagtcccacagagagttaaggtatctcgggaagttcattaacttggcaaacggctggagtctctcttccgaggagctgagggctggacaggcaggtcccagcgtcccccgtcctgactgtttgtgtggagacactcatgtattcatatgggaaggggggctctattggaaagggaagggctttttgttctgcagagttacgtggtcttagcagtaatcactttggagtgggctgctggtggccttgggtgcagagactcctgtgggcatctgcgcacatgggggctgtgtcctcatccctgtctgtggcttccccaccgtgttcccacgtgatgccttcgttcagcctctggctttgtgtttcagaccccaaacgccccttcgatgtctcagctgggacctgggtcccggctcagcctcacgcggcgtcccagtccctgcccatcagtctgggcctcacggtcaggccctcagtgacagcagccgtcgcttcactgtggcctcgtccctggagggctctgagttcagccgtcgcttcactgtggcctcctccctggcggggctctgagttcagccaccggtgagattggtttgttctttactgtggtgaccacacggcggctgaggctaagctggagccacggagcaagggccgcctcttcgcctgcccgggcccctctagccccatcttccctctgcccactgacatctgagaatccgccgtcccctggcccgggctcccccgccttctccctcgcctcgctggccctgagtgggcagcaggcatctgcgtggtcaggggcaggcgtcgcattttcctgtggctggaacgtgcctgcaggagcccaggcctggactctgcacgtggtcatcgtgctgcagttgccgtctgtggtcaaagattttaaagttagtttagtgagaaaatcgactccaaacgtgatcagaggggtcgacgcgtcccaggatgagtggttcccggggctgggcgttgccacgggccttgcatggattttgctgatgaatctcagggctctgaggctggcgctcatcgggccccacttgggggatgcagaagggaaggcactctgaacgaggggccctgtgggaggccccactgcgcaaagggtttgactcctgcggcctccctcaaggcctttgtgcttgctttgagaatcaaacgttcctgttccaaaccaaacttgcctcttgcatatggaatcagactatagtgattgtaaatggtagcgttaaagataaaaacaaacagttctaaaaatgactcactgctgaaggcggaaccacgcgtggtgcagagaaggagggtgagagggaacggcaccacactctgtgtttacctctcaagacgctgatgagcaactcatcccacagaacagctggtcctgaacatgtgtgtgccctgccgtgaggcgcacaccttcccagaggcgtgagtggggcccggccactagtgtcctggcggaagcaccggggctgctccatttgtctggagtcctgtcccagtggtgtgggttttgagtctcacccacacggcgccggccgagaagccatgagcggctctgcagggtggtgcggactatagacacctccatgcatggttgccctaggcagtgtctgccgccagcgtctgcctctggacactagctgctcagccaccaggacggcgttgagcgctcccctgcctctgcaggaggagaggggcagggagccatcaggaagggtgctggggcctggggcccgtcgtgctgtgtgtgtgcaaacgcagtgtggcgtcccctgatcaggagtgggagctgcgcgctgcccggttccaggttaatggaacacaggaaggtgggtcatgtcctgcggggcctcatctggatttattggtgaagcgagccttgcacatggctcagcgagggctccgctttcctgcacacgccccctgccagcttcactgtggcctcagaatgggcacacacagcaagtgtggatgcatacgtgcaaggcccgtttcaaagcctaaaactcagtgcccaggtccattgggataacaaggcattttctaatctgatttacaaagacaccagtatgacatggcagagaaataaaaagggggcagggcagggggacacaggcctcgaacccgccgcaggttttctctgcgttccggtgactcccggcggtctgtgctctgggtgctgagcaggtgttttctgttctctcgccagctgcatggctacttggagaatgagccgctgatgctgcagcttttcattgggacggcggacgaccgcctgctgcgcccgcacgccttctaccaggtgcaccgcatcacagggaagaccgtgtccaccaccagccacgaggccatcctctccaacaccaaagtcctggagatcccactcctgccggagaacagcatgcgagccgtgtaagccgcgggggacctccggcctctggcagggggcggtaggagggggcgtgcctccctcccagtcccggggggtctggccagccccccgcacttccaggctgcgtggccaggacacttttggtttaacagccaataagtaaacttcactcttgcttttgacaatggatttgcttctctctagggtttcagccctgtgtatattgccacttaaaatgtcagatatgcagctataaatacctccctctgcatttagcttctaaacaggacccctatttctttccgaatacagcagtgtaatgagaggatggttaaaacgtgagcatcaaaaaattaaagcagtcagcacatctggatcacgttgacctttaggaggttccgacaacacggataggcctgtgctgatgttctgagtctaatttgacactgtaatttgtttaaaagtgaattttttagtaaggtgaggacgaaacatgtaacttccaaataaggccttactcacttaatcctagcttgtgctgggcacgctggccctaacctgtgaaggcagccgaggaggaggactgctggttcccgagagattgatgtggtactgtggggggaaccgaaaacagacacatctgtgggtgaatgagtgcaggttgagctgggacggctggaacgtgcagaccagcaggatggagccaggccggagggcagggacggcgtcctgcgagggtgacccgcaggctgggagcccgtgtgatggggaagctgtgtgtggggtgccccatccaggtggagccccgggggtgggtgcagaggtcctggggctgcaggagtggggaggagtcccgcacggtgagggagagcgtgtaggagatggcggcggggggccacgttggggattttaataagtgattcaaagcctgtaagtcaaaaagggaaagctttctctccacgttgacttttcaagcactgggaggaatgtacgcacctgggaattcattccaaatccctgagtttgcctcgagagctgtaatccaagtttcccgcagacagggcacagtcaggtgcgttccacagccgtagtaaacgtcctggcttcgctggcggctgcgttcaccccaccatgatgtggggcagaaagggtggccgggagacgcccgcagccaggaccgcgctccagccctgtgctggctgccgcctcgtgggtggtcggggagtctgtgtttattctcattctcttaacttactgaaaaatactgctttttagtgcattgagaatgtatacatggaatgttttactggagtctagttttgaatgaaattgttaagaggttatatgaaaccatagaaaaaatgggttttacacacaaaaaatgagggcttttaaatatagtggaaataatagaataatttattctaattatgatttattatatattttatataattataaatatataatatttaacctaataatatataatatataattattgtaaatgataataataaattgagctttttgggaactactccaagataagtgagaacagcaggtgcctctggcccctcccctgggccgctctctgccgctctggtgacatccccgtatacgtggccagcgtgggccctggaggcagccaggacttgggacagctccgactggacccgcttggtcaggggtggagggtggaggctggaggctggaggaaggtgggaaggggaaggtggaagtggcttttctcggggctgcctctgcttgccccctcgcctgcgccaatgtcagattctctcctgcactaggcaagggcctcacgtcgctggcttcaaggtcttgttttccttggggaaggggagagtggccagctgcctggcacgagctcgtggggctgggatgagggccagagggtctggggggccaggcctttatgctcccgcgtcagccattgaaagaaaagctgtgggcttttgttttgggcagcattgactgtgccggaatcctgaaactcagaaactccgacattgaacttcggaaaggagagacggacatcgggaggaagaacacacgggtacggctggtgttccgcgttcacgtcccgcaacccagcggccgcacgctgtccctgcaggtggcctccaaccccatcgaatgctgtaagtggacgtccacgcgcccacaggggaggaaaccgtcccgtcacatgcgcttcactgtctcaccctctctcagcttttcgttcgtgtagacttgggactgaacggttcccaccaaacccaccacagtgtgtggccacgaggggtctgagttgatcatggctgagttattgcctgtggcctcccgggggcccctggcgctggctcctctgatggctgagcatggccagggaaagcggtgtgggccggggcttcccctcacgctgcgctgacctttgcgtatttgtgcgatgactgtgatttgagtgaaattggctgagtcttaggaagatattttgatgacttcttcagaacgaggtggagaccatcaggatgaagtgtgcacggcttctcccctagaagtagtggcatccgcaggggtcggcccgcaggtcgtggcggtgcttgctctgggtgggtcggctcacgtgtgacctgctgggtgccacacgtgtgccccaggccgcccactcaggacaggccctcactgcccctctccttctgatgcagcccagcgctcagctcaggagctgcctctggtggagaagcagagcacggacagctatccggtcgtgggcgggaagaagatggtcctgtctggccacaacttcctgcaggactccaaggtcattttcgtggagaaagccccaggtatgctcttcaccaggggccatctgcggcctgggcttcggcgctggtgggaaccggttcccagtcggtggagcaggacccacctgtgcacggtcaccgggacggggcttatggggtgtggcacggagcagaggctctgcgtggcccgtgtctgcatccggctgtgggtttttgtgtgagccgacagctgtgctgctgaagggaagaggtggatgtttatttctggggccgccggggccactgcactcacatcgctgctgatactcagggagcccacgggctggggacgcagaggagggcaagacgcatttgctggctttgctggggtcctccatctgcagagagtggacgcttcgggggtcagttagcagcagggcaggagggagctcccctccggggccttcccctcccgccagcattcctggggtcggaggcagggatggggtgggtgccgcagacggcgggagctggggtggtctttaatgccacagccgtggtgtgtgtgaggctctcgtgccccaagggcacaggtcacccctgcctccaggtgttgcgctggcccagcctggaggctccggggctgaacttggaagggcagcaggggtgtcctcggagtgatgttcctcctggggccgtcacgcctgtggttctgtgctgcccacgggagactgtcctgcggggattgggctcacagagtggctcccagcccaggtcagttccatgcagacgccgggccccagcactctcatcccagaggggtggcctcgccggctccgagcagagtgtgtgaagacagtgggctgcactgatgggaaactggcattgcagggagagtgggcaccagtgtagctgggcacagggaccctagcccagccctcaagggggttcaggcagagtgggcctggctctccgcaaagcctgccgtgagctccctggttttgggggttcctggtgccttgctgggcctctgcccagggtgcgccaggtgaggggcatgcccccacaaggcctgttttgtgatatttttttccttttgtacacttaccaattggaattcttttgcacttactccaatccctggaaaccgcggaggcattcagccttgataatggggtcttgatttgtacagtttgccggaaacttaagtgcttcaatcaaaatcggctttagaggtctttgactctaacttggcttcctatagaatcagggcttaattggaaaacatgttttaaattacagagaaaaccaactaagggcagtgaccgggaaggcatttgcattgcccgtgccttctcgggaggaggctaattttgaaataattttcccttcagagctttcggtgtgtgtccacgcgttggcggagaaacacttcgcccacagtgtagggcctcgcttgggccaagactggccagaaccgtggctcccagcttctgcttttcaaagcccagacctgagcagcctccttgctttttcttctgcccagagaggcctgggcaccttggcagagcctccccccgaatgcagtccgcagaggtgccccagctcctgccctagccaagttactgtgctgagttggtgccacggcgccatgggtaagggcagccaccagcctgcgagggccaggagccaaggggatgcaggaccagccctggcctcatgcggccgcccctacaggcagcccctcctgccttcatcatcactgtgagctgtggggtcagcaggccggaggggtacctgttctgcccttaagctcggctgccacagccacacttctgggcaatgccagtttgtctgcccatgtcctcctcttgtcccatgaggtcagggtgggtctctgaccctctgccagcaccagccggcgtctggtatacagcaggtgagccataaatgaataggtgctgtgctcgagagcacgtgaagctgtgaatactgcagggatgaagccagaccacgttgataattttattctttatagttgaataagataatttgcatattcatacacacacaagcacattccatgttttcaaaagtggagaacaaatgtccacataattttcttcctccacttccggcttctcaggcgggagccgttgcttacaacacgtgctgatgtgcagtgacaggttggtgcagcagaaagccccacatcctcatcctggcaacgagagaaaccactaaactgaatttaaattaaaaacacagttgccctctcgttttctgatgggatcgtctggtctgtttaaagttctgttttagactgctcttgcagatggaaccagggccgggtgtgagctcaggaggggaggttcctgctgaggaaatccgtcagtagggcagttgaagtggcttctccaggaagggcccctgcgtctctcgactgtcctgctcattccgagggtgcagatggttgtagctgttgggaatgttggctctggacacaggccagggtcggctccaccctgtccttctctggagtacgtaggaagctcattgtccaggccagctcagcctctgcgtatcagccaggccaccttcagctgctatgggttcacagcatctctgagctttgggaagttttagatggagcggctccactgccctggaaggctgggagaagctggtgttggcctcatgaggaagggagtccccgcagcagggctgcattgcggggagccggccgggcaagggcatggctcgccgtagcctgggtgccgggtccctctgggatgctccagcagggcaggaggagggtgggtgtttgagtctcagcctgcgctccacggagcttcctcccaggtgtctcagggcggcgcaaaaggccgggagcggagtcagcctttctctgaggacttagtttacagcttcctcggaaaacgacattttccgatgatgaaaatctgtgaggaatgttcttccaggaggcaggttggctgtggggagccgagggccgggtgttggtttagaagcccctggtagcatcacaagaacccccagtttccaaggctgcaggggttcagctgcaggaagtgggaaccacacccctctcccacccacacccctccccaccttcacacctgcacccctcccgcctgttaaagatcactgtgtctgtgttccgatgtgaggcacctctctgtacacgcgtgaacgttgaagctgctgagggacacactaacgttcaacataaacgaaacgcccgaagaacgcccgcgtgaaacgtgagctcgggctgtgtctagagcctggctgagatgagacagaaggcgcaaggttctgagatgtggatgcatcaaacatgagccagttctcgatgctggagctgaacaacctccttttcttaagtcacgcgtctgttctggtgccgttttttaaaaacatcagcgaagcctgttttggtgtcgctgcgcggaagccacactacgacgccgggggtgaagactcccactccgtttgccagcgatcgcgcagcgggcagggctcagcgggtggggctgcacgggtctcgtcagtggtcgtttctgtggccgccgtgactggcaggccagctggggcctggacggccggcgtctccttctccaggtaatcagggcccctctacgtggcctcccggggcccctctggggaggcagcctggcatctcacaggcggccggggctcccgggaagcagagacgggctgtgccagggctcctaggcccaggcctggacccagtgccgtgccagccaccaccccaggggccctgccctggttcgcagggagacacacagaaatgtgggaggccgggtggcctgcacggtgggagcgagtagacagagcccctcccggaggcccccagcccagcacatccagagccctcccctgagaaaccccagacagccaggttcgccccaaacccaacatggtgggaccccagctcgccccccatctcatggccgccccatcccacggccgccccatcctctggccctggatgttaccacgtggagaagacaggcctgtgggcaggcactagccacactgcaggagacgcaggctaggtttccagatttctccacacagcagcaggcggagggcctgcctcccacctcactgggagggccaggactccaaatctgggccaaatgtatgttgttatttttcaaataaagggaccaaaggcccgggcctttccaaggctgccctgccatgggaccgtgaccggtgtggttcccaggacttccacaagctctgacaggcacctggccgttgttttgggaggctccacccagcagccacagagcttagctggcagctggcaggacacttgcaaggacacggaactgtcacggaaccaccgtggctttgggctgtcacggaaccaccgtggccttggcagctgctggtcctatgccgggacacacacattcaccgcggcgagtgtggggtgcatgtccccaggcagaggccatgtcatccaggtgcaggaagcgccaggcaaggaccctcctgtccgcccagagagccgggtcagaggagtccccaggcctgaagccactccctccgggctcaccttcaggttccttcaaggccagggggaggttcacccaccccagggtgtcgcggaagccccgaggcccctgcaggccccgatttccccagtgaggcatcagtgcccgctggccaccctgcccctctcctcctccagctgcccctgctccttgttttcctagggtctggttctttctcgcgggcggggaggaggtgagggtcagggcccctgtaaggcagactagtggcactgcccctttcggcccttgctgtccctcctctgtcccttgtggaaggtctcggcctggggcagaggagcgggccgaggaggaaggtggagtccaggtgggtggtggggtctgtgttctgttttagtcgtgcgggatgtaggccgagggagatggacccgggggatggctgcctctgtggcatctccgtggtgtgccctctgacggggctgggtgagcaaggaggacacagctgggaattcccagctccagcgtccgcggcacgggcagcctccctgtgtggagcagctcagctgtcacctcctgaagatgttggatgctggccccgaaggcagcatcgcaatgacaacaccttcagaggtgtccatcccaacagtttaaaggccaaatgcagatctttcagatttgtgttttcagggagaaggtgacattgctgggcgcctgtgagtgtggacagacatcactgtcgccgtgtgctccgagagaggagagttggggctgctttgtcaccacatggcgtctttgggagcaggacaggtggccgggctgaacccccaggcttctctgtttgctcccagagaccacacagggaaggcaaggagggcagcgcccggggaagagacacctgcccgtgtcttcctcatgccctgaggatggctcagtggcccagatggtccaggacccctagaattgagtgatgaccccacagttctcatcaagccgcattctggatagcgctaggggcgactctcagactccccctgcctgggccccgctggtgtggggaggccacgcgtcacgtcagtccccactgcaggaggaggggccgggcttctggctcccctccctcctctcccttctcaggccttttgggatcatacacgacaaagtcacccatggtcatgttggctagtttcttttttatatcagctttatcgaaatatgatctatacaccatttaattcactcaaagtgtataattcggtgggttttggtggcttcacataattatgcggccaccaccaatttcagaacattttcttgtccccagaaagaaacccttgcccatgagtggccacccctgctctcccttcccccaccccggctccgacaaccccaatgccccctcgccgtggcctcgcctggtctggctgctccctgctggcctgctggggaaccccatcctgccggctgtggtgcctggcagcttctgtggagcgtggcatcctccatgttccctcgttggtgtgggtcagggcgtagggtcctcaggtcccctcgttggcacaggtcgggacgtggggtctttctgtggctgagggaagcccaccgtgtggctgcccacacctgtctgtcgatggcactaggccacgtccaccctgtggagatgatcgtggaaaagccgccatgaacctcagtgcgtgagtcctgtgtggacgcctgcctgtctcctgagcacatgcctcggtgtgaaagggctgtgggtcacagggtggctccgtgtgaggccctgcaggcagatgtgcagcagggctgggtggctgtttcccctccagaatctcctctgggagccaggctgggacagactcctgggggagagccggggatggatgagacgccccagggacgctcgcttctgggcatgaggatgctgtggggtgcacggcacgaggacgccgcggggagcagggcacgaggatgctttggggagcagggcaggagacgccgtggggagcagggctcgagggcaccgtgggacccagggacgctgctgcttccaccagcggccctcgtggctttctttgtggaaacagtggctcagcatcagcaccggcgtgggggtggcccggctccgggcggcgggtcctggccggtctgggaggctcctgggcccgcaggcctgcctgtgtggaaacctcgcgggtgtggcagggaagcctcccgatgactcagactgcagggaattccctaatgatctggaatatttttactcctgcactcgggcagtttcctactaaggactcggagctctgataaggctgaacacaaaggccctttcaggaccggctgccttccttcctgccaggggctgagttttgaacagcacgggggccggcgctgcccgtccgggcctccacggagctgggagccgccatggcgatgctcttgccggcgggacgcggccctgcgtctcctttcctgagatgcgaggttatttccatctttcagcagtctcggcgctttgtcttgttctggaagcaattgctagatagacatttctggccgtgaatactattgcttttgaaagacaattactttatgatccttaagcagaaacagaaagcctgccctcaccctcaccctggtcgacctgaaacggccacagacgtcggacaccacggggagaggccccacctccaagagggaaggccacaggcgctggctcagccggggtctttgaggaaggcagggatgtttgtcggttccccgcacttttaggggaagtctaagcgtatctgctcccacctgcgcaggaattgcagggtgcgggtgctcccaggtgtgcggtggaggctgctccatggcagctgctgagctgggcctggctggccacgcagacgtggctccccttggggccgctccggcaaggatggttccccacaggcccacgaggcacgggtgggaaaagacgcctccatgccgtcgttccatttgcttttcatggactcaccgctgcggggcagccacctggaggaggccgcgggggagacggctggagtccctcttgcttctcgggacataaagagaggagcaggctgtgttggcctcggctgcaaaaatggcgtcccctcggggtgtcattaaacgcgacatcctggccccgtgtgcgcctcagtgtccctcctgctcagcacagtcactgaacctccctccccttgccagtgccaaaggcctccacagcgtcagggaagttcctagggaagctgaagttgtgactctgagcttcctgggctgggcgggaagcaaactatagcctgttgcgcccgggagcttcagaggaccacagccttttgtggggtgtggacggggcctcaccccaaagatggactttgtcataagaaaagttcaaaagtcattttcaaaaggtgccaaacaaccagaagacttagttacacacagagtgatttggatttttatgaagtgggggtggaggggcttctgagtggtgcatctgggctgggggcttctgggaatcctgtggcatcagcacctgtgctggagtgaaaacgcctctttcttcccagctcctgagctttccagggcctggaggacttgctgcttcatgaaactcagatggcttcaagcgcaactgagtgtactttttagtttcctgtaatttttttcctagaggagagagggatgccaggctctatcgagtgggttcatctggtgggtaatttgcgtggggacctcgggcctcccgggctggcatggccagggcttggctgggcggctctggggtcctgtgtgactcacatttcctctccaccctccacccaggcagcagcccggcactgtaacagagaaaaaggagattttgtctgatttatcagtaattgagggtttgtaacagacacacattttcttctttggagacagagcataaggataaacttaagtgtgtatacctgtaactgttcattttgggaacagactttattttggagaagataaaaggcaggaagagactctgtaggagattgacatctgttaatttgagataattgccccaaactcagcccatctgaggggccaggccgtgcacacacccaggctgtggtggggccgccttgtccgtgtgcgcctggagcccccactctgccaggcctggagcagagagcacaacgcgtcctttcactacacctctgggagcctttttattttttaaaaacatgcaaatggccactggggaaatgccaaaaatacctcgtgttttgcatttctgtctcctgatgggcaagaagttgtcagaggaaggctcttctcatttacccagtggttcctttgcacacaggcagggccagcggccaggccctcatccaccagagtagaccccagcacgagcaggcgtcgcaccctggcgtggagcccccggccccccgtcactactctcacacctcctgcatccctgggaggctgggctgggaactgcagagccgggtcccaggtccacgcacagacgccctgcacacgctctgctgatggggtacctgctccccctcacacctgctctccctggagaggacgagggcatagagaccctcccgtgacctgtcctgaggctgtgagaggccagcagatgcagggccaggacggattcctgaggatgcccctgccctgtagtccctcctacgccgggctggggtcagaacaagccctgagccgcgtgtcctcagcttctccaggctcccagggcaactttggtgtcgagctcggggccctgccagggcacgtggctcctgaggtgctgccctcgacaaagccctgggatgggcctacgtgggtctcctgggacaaggcgccctcctggctcagggccctgggtctggatcacgtgggggtgtctggggagggggctccccaccacacagagtcacagacgtttcctgctcctttcttccagatggccaccatgtctgggagatggaagcgaaaactgaccgggacctgtgcaagccggtgagtgcctttggcgcagctggagctactgtgggtccccagggcttgggaggctggggtctgctggagccactgcgggtccccaggccttgggaggctggggttcctgtttcttagaatgaaacaaataaaaatagtgcatagagtaacagaaccagtaacaaacaggatcaccaagtactcgccaaagcaccatgtgctgtcacccaacgtgtcaggtcacgtcagagccctggcggccggggacggtgctggacaggctgagggccacctcacacaccctggcgctgagacagcccagggaaggtcgtctcacacggaccctcccgccctttgctgtccccttgctgtcaccatcacctggcacagagcaggctcctgggagtcagtgctgtgctgagttcccggggggtggtcagcacctgcccagacccgctcacagcaccgagggcagggctctgcggcatccccagtggggactcctcaccccgtcctccgaggccactgattgcgccgacctcccctgtgatggtgtcccaagcacaagagcctgggcgtggctcctggactcgcgattggccacagcctgttagcgggcggtgcatgtgtgcggggtcgtggcagacgcgtggctgggtcacacttctgctgtcaccgggccgtttccaactcccccagtcacctgccacagcttccctggcaccgcgtgcatacagccggtgcctgaggataatgaccgtcctcggattggagatgaccttttgtgtggatggctgtagctgctcccacatctcctgcacggcaccggttgctgcgtgcatctctcccatccctgcgcttctgatccatgtgctcatgtttaaagtggtttcttggaggcaacgtcttcttgggtggtgtcttggatcctctctgacgctgtcttgtaattggcacatggagaccattgatgtttaggtctttagttttgtttgtttttgtttttttgaaacagagtttcgttcttgttgcccaggctggagtgcagtggcgtgatctcggctcactgcaacctccacctcccgagtagctgggattacaggcatgcaccaccacgcccggctaattttgtaattttagtagagatggggttttgccatgttggccaagcaggtctggaactcccaacctcaggtgatccgcccgcctcggcctcccaaagtgctgggattacaggcatgagccaccgtgcccggcctgatgttcacttattattgatacagttggattgatccctacgttggattttttgagtgttctgtttagtcctataaaagcagtagaaatctctaggccaacataagatgccacatggctcacaagggagttttgaagacatgaacatgcttctgagctcagcagtgtgtgtccctgcgggtcagggaagtcttgtgcacccactcagtgtgtgtccctgcgggtcggggagtcttgtgcacccactcagtgtgtgcagttggaagctggtcccttcagaaacctcagggaagagcccatctcgggcggctggaggcaggtggacaggacaccggggaggagtcttgaggtcgtctcctgttggtgggacgatcggtggcctccatggagagcggtgctggcaccttcactccctgtcccaagaggtggctctgtcagaaagcagcgtcttccaccctgcgacttcagcgcccttcccccaaggacccatccccttcccagaaccttttccaagtggttatcagatggaaaaggttcctccctggccctgggtgaagtgagctcacctgcaccttcagtggtgctcaggcctcccctgaagctcctggcactcacagggttccagttcaatgctgtcgcttttcttgccttcacctgagaagccccttgaggaaagctggaggccccagggcaggccagtgttcagaggaaggagtcccggcctacacggcccgttgtccgcagagccagtgagtcagggtgctcagaagggtcctgggaacggccagccacaggcaaaggcagctggagctgctgtaccggcctctcctccccgcagcctgttcccgtgtccataccggcctctcctccccacagcccgttcccgtgtccataccggcctctcttccccacggccatttcctgtgcccataaggtctgtggctccccgctggccgggcgtttgcaactgcccagggggctggcagccttcgtccatggggtcattgccaggcctccccacctactgggtgtctgattcgttcctccccactgggctgcccttgctctgctgtgcgtctgtgctgggtacactgacatctggctctccgtccctctgcctgcaggcagtgtaccctggtgcctggcctcgtgctgcctaccctccctagccctggctccgtcggggtctccacaggcttcgccagccccgcacatgcacgcgggttgcgggatgcaggatgccggagctgggctgcccagccgctggcctgccctgtccccctaggcagggagagcagccaggaggagccgtgagcctttctgcactgaaaacaatcccagccaagctgacatccacattctctgtgattttctgttttacttttgacactggcatatttcgagggaagcttaacagctgtatgttttaaaagaaacttaagagcacatgtgaaaaattgtgtacttcaagtttactggttgttttttgtttgttttttgtttttttgagacagtctcgctctgtcacccagattggagtgcagtggctcgatctcagctcattgcagcctccgcctcccaggttcaagcgattctcatgcctcagtctcccgagtatctaggactacaggcgccggccactatgcctggctaatgtttttgtattttttttagtagagacgggatttcaccatgttgtccaggctggtcttgaactcctgacctcaggtgatccgcccaccgtggcctcccaaagtgctgggattacaggcgtgagccaccgcgcccggcctgctgtttcatttttaatctcttaaatggagtttgctttaatatatatattttctcatcataaaggaacttcatactcatcgtggacatttggacaatataaaaaaggaaataaaacctagtgtagtctcaccaactgagacataaccactgctggcattgggcatgcgtcctgctccatttgctgctgtgtgtggatgttcacgcagacacacacacacacacagagtacattatattgtggatatatgtgtttgtgtgtgtgtgtgtgtgtgtgtatatgtatgtgtatatatatatatttatttatttatttatttttttttttttgagacagggtcttgctgtgtcatccaggctggagtccagtggcttgatcatggctcactgcagccttgacctcccaggctgaagcagttctcatgcctcagcctcgccagtagctggggacacaagtgtgccctattctgcccagctaatttttaaatttttgtagagatggggcctcgcggtgttgcccaggctggtcctgaactcctgggctcaagcaatcctcccacctgggcctcccaaagtgctgggatgacaggtgtgagccaccgtgcccgcctgtgcatattttgtgaacaaaatgggatgtgctgtgtctacggtttttgtactttctataagtaagtgtatgagcttcatctcaacagtggagtttaaagcaggttgcgtaggtgctggtgccatttggaacccgtattttttccggtacagacgagtttccctctcccttcctgttcttccgtgtttcttctttatcgcttccttctgtgtgtatttaagtggcagtgctcccacggagatagtatttttgtcatataatttgtctatttagagagttgaagtgggttggcctgtgcccacatcaacataggcccttccagtcaggtaggacttaggaaaactggcatgcaccgtccagcatgccccacagggtcccacctccacccatccagcctgcctcacggggtccccgcctccacccagtctggcccacaaggtcccgcctccgcccagccagcctggcccacggaatctccgcctctgcccagccagcctggcccatgtggtccccgcctccacccatccagcctgtcccacagggtccccgcctccaccccagcctgtcccgtggggtccccgcctccccactcctcgctgctgcctgtgagtgcctcccggcccgttactatttcagtctcggcttccatgagacgtttccttcttgtctcttccctcagctgcttctgctctaaagacccacctggtgtagctgctgactccatcgcagctgccctgagcactgctgaattcagaaaacagccttggaggaagcgtctctttatcccccgtacaaatgccgagacaggctccgggtggccagagcttcccgggtcagcccaggagatggcccagacccacagtgctctgggggcagcccaggccccgcccactgacagcactcatggcccctccggcggcagcttcagctcccctggggcagctctgatgcggggcaaaggcaggaagacgcccatgtgccatggcttctgcttcttcccaatgaactgcagttaattaaacaacacagacctgctgccaggagaaagtgtggcccctgggcacagggcccagtggggtggggagcaggggtgcggggagggcatggcccctctgcatgggtgtctgggcctcagctgtttcattatttgtaaatgaaagagcctggacctcaagttgtcttcagttttctgtctttaacactcttaagatttcattgttaatgtgattcaatcaatttggctaagttaggtgctgagctataattaattattttaacaaaagaagtaatacaatggatttttctcctgcttgttaaactaagtcatatgattataaaaatgaaactttatagatgcgactcccgccaaccctctccccagataccaagtgccgccctcggcagggatgcctgcatcaccccagtcatttagggtcatcaggggcccgagtaacgctggggcctgagcacgcggttggggtctccgtgtcccagccccccacccagccccgacctctgcgaacagcgccacacgtcccatggcttgtgtttcatgtgtatacttgaaggagcatgagtttcgtaaacatgctgctggctgttacattaaaaacatgagaaggtaacggcagcctccacacgccgccctctgctgtctgtgcctccgtgcccttggctgttcccaccccggggtctgcgggggtcagggcctgcctcctcttcctcagttggagtgaatttggggtctgactgagggcctcggccatcgtcaaatgtgacaaacacaggccctccccagagaccgcgtctccaggaagcacctgctcctctgggtttcgctgcagtcacctgagcaggtgctgggccaccgagcacttccatcacacagtggctggcggcggagccttgggtcgttttctgaaggtcaccaaccctttggcatcagagcaggcagagccttttgcatccccgccagtccccttgcccaggtggccccgggcaacctccaccctcaggcacccggtcccagttctgtttacagcttctcttttcctggcttctttccccatattgacaagatttcagtcttaggttggtcttgtctgctgtgctgctctgaggaagcctctcggctcctgggtgtgcaagaagccaagggcagccccttccctgtgagcgtgcgtgtccacacgcgtgtgcaggtggcacagagcatccagggctgtcatcagctgcttctggaccgcccaggtggctgcttgggagtttaccgtcacggcagtcctgtgctgccgtggaaacgcggggttgccgtgtggccgccgtggaaacgcggggttgccgtgtggccgccgtggaaacgcggggttgccgtgtggccgccgtggcgcggcagccatcgcctgcccggtgctgattgtgcctcctgtgtgcccttctcctgtagaattctctggtggttgagatcccgccatttcggaatcagaggataaccagccccgttcacgtcagtttctacgtctgcaacgggaagagaaagcgaagccagtaccagcgtttcacctaccttcccgccaacggtaacgccatctttctaaccgtaagccgtgaacatgagcgcgtggggtgctttttctaaagacgcagaaacgacgtcgccgtaaagcagcgtggcgtgttgcacatttaactgtgtgatgtcccgttagtgagaccgagccatcgatgccctgaaaaggaaaggaaaagggaagcttcggatgcattttccttgatccctgttgggggtggggggcgggggttgcatactcagatagtcacggttattttgcttcttgcgaatgtataacagccaaggggaaaacatggctcttctgctccaaaaaactgagggggtcctggtgtgcatttgcaccctaaagctgcttacggtgaaaaggcaaataggtatagctattttgcaggcacctttaggaataaactttgcttttaagcctgtagtcctgatgtggtctttaaggatggtgaatgagctttgtgctgggcggacgtccccgagacacttctccaggggtaacttcatctcctgggaccacgggcatccaggctggggcaccttctcctcaacctgcctgcccctcacccgccgtgggaatggctccttttcactcatacaaaaaaaaaaaaaaatcatcttacctttttaacctttagggtgttttcttaaagaaaataccatccagtttgtttcttcagtccctgaaccagtagaagagaaaggcgtcccccacgccatccccggcttcctttgtgggtacaggccactccccccagctcggagaggacagaattagcagtcatcctgaattttactgtattttgtgggtacaggccactccccacagctcggaggggacagttagcggtcatcctgaattttactgtattttgggtaagcttagctaacatcaataatctttttatattgctttttttctaaaaactgcagagattcctgtcatctgagagggaaattacacactgggcgctaattgcaaaagcagctgcgttctcttagtaaaatcagggtgttttggaaggtttccattttctctgaatgtaaacagcatttgtaatagaccagatcctaaggaagcccttgaatccccacgttcacaccaaactgttgggactccttgtttttatcaggcaagctctggaaaggcctctcaagatgtggaaaatggggttttgctgtaaagtcgctgtaccctaagagtgtctgtgagacagagctgcaggggtgatgtgcagcccccagcccagccctcgcggggaagagcctcacgctctgtgacccccaggattgtggggagggcctcatgctctgggacccccgggattgtggggaagagcctcatgctctgggacccccgggattgtggggaagggcctcacgctctgggacccccaggattgtggggaagagcctcacgctctgggacccccgggattgtggggaagagcctcacgctctgggacccccgggattgtggggaagggcctcacgctctggacccccctggggtttacgtggtctgtgccgcccacacttagtgagtccagcccattcttggaacaaagtacaatatatcttacagaagaaaatattttatctttttctgaaaatataatgattgagtcctaattaaacttcaagcatggttgaccagaaattgaatgttttaaagaaaacctaggccttatagagaaggattgctttccagagcagtgcattaatttttttcttatttgctcagcatgcggcagtccccaccgtgggtttgagcagcactgactttagcacagatcacgtatctcagaggcagaaggggcgtgcggggagcgtgcctgcccttcacaggtgggaggtggcggcccccaggaccgtggccacagcatgaagccggtggggctgagccgctcctgctacctccagtccacaccccacctggcagccggccgtcctgtcctaccagccacactcctgcctcgattggccccggctcccctctcagcattgtgcccagcgtggacatctctcctgcaccccctgcccagtgtctcggctgcaccctccaccccccatctgctccagcatggctcaacgcaggccaggttccccaggctcaccctgggcaccagccttcgcccgttctccctctctttgcctccgtcgtctcttctctcctggacgtagcaccatagtccctgggtgaccatcccaggtccccacaagcacactgaccagccccaccagcccccaggggctccccggctccctgtcaccccacctggtcctgggggctgcgaccgcaacctgcaccagactgtgagcccctcaggcagagcccccaggctgccgcagggcgagatccccagtgttgacgctgggcctacctcgaggccactgtcagtgtggttgttaaataaataatgaatagaaaccagcacccaggtatccgtgttccgtcccgcgtgcccgctgcacttcctgcctctgcaaccccggctgggtctgaggacgccgaggccgctccaggacctgcgtcctccgtgctgtgcatctgtgtcttggggtccagctcagatggcttctgccacgtggtccgagagatagttgccagctctgcttctgccgaccctggaggtggaggcaggacgggtgggtgtgggtggaagacagctgcttagcaagcaccgccctgactcaaagctgctcttggctttttcccttttctacaccgtcatcatggggtcgttagcagtctaggtttccgctgtgccgatgagcttcgggtctgcatgcccgggggtcacggcagtgaggggcggactcctagggttgtgaaatgtgccgttgaaatgcacaaggtgacaacagtgaacccacttacactccagctgtggaattcatttcacgtacatgtttgtaaagtcaagtctcattgtaggttttccttcaaaattgccatccccacaggcagcacagggaggcccctccgagagctccaagcatttggaatccaggtgcccgaggtgtccggtgcttgtggggggcgggctggggacacgccttggccaccagccgcccgcactcctcgtctcagtgccaaaggcatcctccgatgactcggccgaagatgagctcagtccgcagcccctgtcccggccccgcctcccgtcttcagggggcctcacgtctccttttgagtcagaaggtcgcagtggtcggcctccgggaatcaggcatctgagtgcagggggcccccgggctcaggtggggctgacacctctggctgatggtctgtgatggggcccagagggagagttcccttcaccctccctggggcggggggcaggcattaaatggggagaagttcccagcagaatgtatgagccccatgaacggagtgggcatagccctcggggagtcctgccggccgcccctcctgacatcccggggtgctgcccggtgaggaaagtgaaaatgttgtctgcagttagaggctggaacacacatgcccacagagaggcttcctgagcggcttgtctgtcactgtttttgtgtaactgcgcctgaatttaatctcccggaaggcgcgttaggagggctgagggatgatctggtgccaggaaggttggcagttccgagaggttattccagcacgtcagcattaaaggagagaggcgaacctggaacgtgggaaccctgcccaggtctggttagaaaggcggcgtccgcgtggcctggggcttgtgtgaggggtgcacttgtgcccccagatacaagcaggcagggccgggaatctgtctcgtggggggctgcgggcactttggagaaagaaaaccaagttacaaactcaaaattacctaccaaagtcagtatttttttaaacgagaaaataaaacatgacaaatgccaggtctttttgtctgaagtcgttttagtcggttacctggaaacgctcccagggcccctgagctggggacacggagctcttcccccatcagtgcccaggagaagctgctcccggccctaggtccctgtgggaacacacagccagccctgcctctgtgggggtccctttcgtggccagagcccccttcctcaggggacacgcggtccagctgagggtcatcccgtgacaaggagtggctgctgtgatgacccaggcacagaaacagctttgaccacagaacgtgacatccagggtgtgaaggtgtcggaacagatctgcctcgggatctgggggtccttcaccaggggtgggcgtgggccccgagcccagacaggagccagctggagactcaaacgtcacgaagaagggaagacgcgcttccctcccccggtactaaccagcccttctgctggccctgcaacgatgacctaggcttgagaatctgtttctgcctcaaggggtagaaaggggaatagattccattacttccctgtttgcaatggattattaaatccagcaataactgtggcatcggagaggtgttggtacagagggagccggggtcctgtggccttgggtccaccccagcgatcatcacgggagagagctgcttagggtgtgagccgtgggggggcggggggcggctgtgaaactgaggtccccgtgcacagatcccaccacccagggtcgacagctgggggctttctctgctggcacttcccaggcagcagaaccggcccctctaggaagccccctccaggtggcgtggcccaggccctcagtaagctcagctggggctgtgtgagctgaggggctcagagcaccccacaagggatccgcctgattgcagacaagcagttctgggccgccgcccgacctccatgcccttctgctcagcccggcagcctctccttcccaggggtttcccattctgccttttccctggactttccaactcactttgtccaagtccactgcatgtaaagcttgatcctgaaacagtgaagttcttgaggtctctgcagatgctcagcggccccaaatcaccctttcgctgccattggccaaaagcacagcctgggtgggccttgaacacctgtggcctcttcccctccccctcccctcaccccacacacttggagacaccctggggctgggcctgagctcggctctcactgcagagtaaacctgcccacctcagacacccaggcatggctcccgccttccctcatctgatcctgccaccgtggcggctgcctccaagctcctgacaacgtcaggtcagccctggcctcgcggcgctctgggtttcagccttaagagactttccatgtgtcggctgtgggcgccttgacgcaccagggcctggtcacaggttctcaaagcagagattctcctggcacccctcgtgcgccctccaagggcctaaaacgcagacgacccacactccatgccatgtcctgcacaggaaccagggtggcctcccctttctgcagcttgtgggggtcaagccgggacccctacactgatgtttcagcccagctctgccgcagcttagaagtcctacctgatttcagacagagcggatgatgctgacatttccagcccacagcgtggcctgcgccacgctccaggtcgccacaggggtgagaattctgggagcccagctgccgagtgcttctggggttggagctgggctggccccacctgtgaacagcggcctgtgggcccctcatccctgttctactgaaggccccacaaccacctgagggagacagcttttattaaatttcagtttttgtcggttgcctcgctcttcagacggcaagtgagagaagcgtgttctcacgcttactgtcaacgttgcgagggaagcgtgttctcatgctcactgtcaacattgtaaacctgagggaagcgtgttctcagctcattgtcgacgtaaaccccagggaagcgtgttctcacgctcactatcgacgtaaacctgagggaagcgtgttctcgcgctcactgtcgacgtaaacctgagggaagcgtgttctcgcgctcactgtcgacgttgtaaacctgagggaagcgtgttctcacactcactgttgacgttgcaagggaagcgtgttctcgcgctcactgtcgacgttgtaaacctgagggaagcgtgttctcacactcactgtcgacgttgcaagggaagcgtgttctcacactcactgtcgacgttgtgagggaagtgtattctcacgctgtcgacataaacctgagggaagcgtgttctcacgctcactgttgacgtaaacctgagggaagtgtgttctcacactcactgtcaacgttgtaaacctgagggaagcgtgttctcacactcactgtcgacgttgtgagggaagcgtgttctcacgctcactgtcgacattgtaaacctgagggaagcgtgttctcgcgctcactgtcgacgttgcgagggaagcgttttcacactcactgtcgacgtaaacctgagggaagcgtgttctcacgctcgctgtcaacgtaaacctgagggaagcgtgttctcacgctcactgtcgacgttgtaaacctgagggaagcgtgttctcacgctcgctgtcgacgttgtaaacctgagggaagcgtgttctcacgctcgctgtcgacgtaaacctgagggaagcgtgttctcatgctcactgtcgacgttgtaaacctgagggaagcgtgttctcgcgctcactgtcgacgtaaacctgagggaagcgtgttctcacgctcactgtcgacattgtaaacctgagggaagcgtgttctcgcgctcactgtcgacgttgtaaacctgagggaagcgtgttctcacgctcaccgtcgacgtaaacctgagggaagcgtgttctctcactgtcaactttgcaagggaagcgtgttctcgcgctcactgtcgacgttgtaaacctgagggaagcgtgttctcacactcactgtcgacgttgcaagggaagcgtgttctcacactcactgtcgacattgtgagggaagtgtattctcacgctgtcgacataaacctgagggaagcgtgttctcacgctcactgttgacgtaaacctgagggaagtgtgttctcacactcactgtcaacgttgtaaacctgagggaagcgtgttctcacactcactgtcgacgttgtgagggaagcgtgttctcacgctcactgtcgacattgtaaacctgagggaagcgtgttctcacgctcactgtcgacgttgcgagggaagcgttttcacactgtcgacgtaaacctgagggaagcgtgttctcacgctcgctgtcaacgtaaacctgagggaagcgtgttctcacgctcactgtcgacgttgtaaacctgagggaagcgtgttctcacgctcgctgtcaacgtaaacctgagggaagcgtgttctcacgctcactgtcgacgtaaacctgagggaagcgtgttctcacgctcgctgtcgacgtaaacctgagggaagcgtgttctcacgctcactgtcgacgttgtaaacctgagggaagtgtgttctcacactcactcgacgtgagggaagcgtgttctcacgctcactgtcgacattgtaaacctgagggaagcatgttctcacactcactgtcgacgttgtaaacctgagggaagcgtgttctcacgctcaccgtcgacgttgtaaacctgagggaagtgtgttctcacgctcaccgtcgacgttgtaaacctgagggaagcgtgttctcacgctcactgtcaacgttgtaaacctgagggaagcgtgttctcacgttcactgtcaacgttgtgagggaagggtgttttcacgctcactgtcgacgttgcgagggaagcgtgttctcacgctcaccgtcgacgttgtaaacccgagggaagcgtgttctcacgctcactgtcaacgttgtgagggaagggtgttttcacgctcactgtcgacgttgcgatggaagcgtgttctcatgctcaccgtcgacactgtaaacctgagtgaagtgtgttctcacgctcactgtcgacgttgcgagggaagcgtgttctcatgctcactgtcgacgttgtgagggaagcgtgttctcacgctcactgtcaacgttgtaaacctgagggaaaggaattctctctcacatgctgtggggtgctggccccaccaggcctcccaggagacctccccaaaagtcagaagaagggctccaattgaaagggaggtccgagatgtgctcgccaaaaccacccccagcaagacgccaggcatcctagccacccgacgctcaggccgtgcgtgtcctcagagcgtgttttaaagcaggagggatttggggtggaagattgctcctgcagaaatcagagatgaggggagtaaattagggaaccagcgtcaggatccagacttctgtgaaagagccacagggctcagcatccgacgggcgcacctggggctgggcgagtctggctccagaaggggggtggggccgggagcctgagatgggatgagagggcgggaaggggcttgttgagaaatctaagggccacgggccaccaaaaacaaaccaggaggtgtgagtcagtggggaggctgggtgccaggaagcctgcgctctgggacatgcgtggggcaagaggggcgccctgagcttggcgacgccagccgcgcgcctgggagggatccgcctgtccacgtgcagccgcctccgggcggcgtcggccatgctgctgccccaccgtggctctgtggctccagccggaatggcaaagcctggctccacagctgcctgggagcgtgagtcacgcgccccacagaacacggcgggcagcgcgggcgaggattggcgaaagccgaccgatgtgttttggcttgtgtggtctgtgggagcgtcctttgtcatcagcctaattgggcaacagatcccacctcactgtgccctggagcagcacggggccaccacacagcctgaagccccacttgcgcttcccctcgctgccgtgctgtcctggccccgtcgctgccacctgaggcccccatcaagtacctgagctctgcgtctgttttcacgcttctgtatgtgtaggaagccccccaccgatgttgctcggggtcgacgtgataaacctgagggaaagggaattctctcaccccgaccgacacacaggatgggtgtgggggcaaagtgagatcatgaacaaaagcatctgggcccgtcctggacacatggccagggttagccacggttgtcagcctccacggagctgcagtttcagcctggaggtctgtggcgtgcatggttggaatactcaccagactcacgtggtcgtgactccggaagatcatgccttcctggaaaccttggaacgcgcttcagcagaaactccagtgaagagtcggtgagagagcacaaattcccaaaggcggatggagttcggaaggacccttctctgtctcccacatcaggcggtgcctggttggtgcagatttaccccatggtgggccgtggatccctcacctgctctggaaactgatcttggctctgaacaaggagaaatgatgcctctcagcctcgagggatgggtgataaggcagcttcatccgctgttttctttcattgtttgagaaaagtcatgccccggaggtgtcattcctggttgtttatgttgatggcaaaacttggactttcttgtcatacagcaaacagaagacaatctgatctttgttttccaggggtttagactttgaacaaaacctcttttgtccagtactgtagtgcatccctggtagagtaattcaagctgaacacaaggttgcataaaaatgtgggcatgggggagcagggaactgtcttgggatcattctttgctgtgcacagcagctgcagcctgcaggcagctcagcgttagatctccccacccccaatgccacctggggaccagatgttactgttggcggaagaagggggtccggggcactgtctcagtctttggggcttccatggtggagcactaccggccgtactgttggtggaagaagggagtccggggcactgtctcagtcttcggggcttccatagtggagcaccaccggccgtactgttggcagaagaagggggtccggggcactgtctcagtctttggggcttccatagtggagcaccaccggctgggcaccttgtaaacaacagacattgatttctcacagctctgggggctggaagtccgaggttgggactggtacggtcgggttctggtgaggaccattccaagttgcagacagccaaaatcctgccatatcctcacatggcaggacaggcgatttgtctctccctccctgtgggacggcagtcccgttggatcagggccccaccctgatgacattgtttaacccccagttacctcctgcaaacaccactctcaagtagagtcacgcggacgggggttagggcttcaacatgaggttgaggggacacgagtccgtccatagcagtgaccccacttgtctaaagccacagggctgagcctgccccctgcccccctgcctgcccatccccaggcccccgttcttgcccccaggcccccccccgcccacccccaggtgctccctgtgctgcagacagagcccccgaggagccaggagctgccgggcaccaaccacacaggaagccaacaggtggggcaggcttgtgcctgccaccgtgttgctcatgccgatttttattctcagatcttgtcacctctgtcttgtagcagaagggggccctgatctgggagccgtgaagaccccagctgtcccccgggagccaggccacaccaaggcagccaaggggactacgttgggaggaggatgtggtccgggccattaagagctgtgatgagcccccaggtctgccctgggtgaggggctctgcctgccctggggctgcatagacccggctggggctttagaacaggaaccgttcgaggggctgcggtgggtgaagcccactcatgtcctggctcctgttaccgggtagggatggcagcccattttccaggcttgggggttctttaagaggccaggattgtgccgaatgctctttggctgacgatggccgtggcgggggctttgggaggggaggtcctggaggagaggcttgcccagctcactgcctgcgtctgtggccagaattggcacctgcatggggcctggaaacgtcgtgctcacctggggcggaagcccccctccaggactcagctcccaacgtcactgctaccgaggcagagactctgcagcggcatcagagagaagctgggccccagaacagcaccaggcatgggacgggccctccgtgccttccacggaggatgcaagcgtgaggcctgggtctgcggggacggtttacctgtcagctctgcacgccgctgaccactgcgcgccgcctccacagacagtccccatggacgctggggctgccgtggacgatggggcagccatcatggacaacgggactgccatggacaccgcagccagcctgctctgtgggaatatgctttgtaaagccagccggccctgaggccagcactcgccttccacactctgctctttgtaacgagtttcataaactcaccctcaggtgattggtgtttctgttgcaccgttgcttagcctgaaaatgagctgccctttttctgagcccatcctttcgccacctctaccccagcccctcatggctgatatcaggaggtagccagaggccgcctggtgcagggtgagcccggaacacgggcaacagcttgaactgggcctgtgcggccccctccacgggcgacagcgtgaactgggcctgtgcggcccccctccacgggtgagactcccaggcgctcttgcagacgctcactcactttctcactgataggatgcgtcttacgaggctctgatttacagagcaggcatccatcttctctgaaacccacacaaaaagcacagtttaggccaagcccaggtgcagtatgttcgtgtgtttaagcttcttagatgctggggtgtggaagcagccgtgtggctttcctttgcttgtgaaggtgagtttgcactttccagcttctctctgtattgggaaggctgcagctctccaggacatgacttagcagagaacatcccgctgcatcctcataggccagcgggtcaggcggggccattctgaaacgtcccctgtgggtgccgggtgcctcgcgcatccctgccgtccaccgccctttgtccctggctgtgcttcgcggcagtgccccttagggcaaggacagggagatggggcagtcgcctggggaaggcccggtcccagtgggaggcagcctcagagcagctgggatggcacaagacgccgctgccagggctgagaaaccatccggccaaccccagacttgagccagacttcatgggcaaggctgggagaagccgcgtggagaccccagcccagggaggggcactgtggcaggaacagggcccgcacctgcagggtcagcccaggccaccttccaagcacggtgaccacgtcgcagctcatgctgccagctccgggccaagggacctggactggctctccagactcacaagatgccgtcgtgggtggggcacgtgcggtgatcccaggtttcaagtagctgcccccagctccctgcaaatagctctgggcggaagagaagcagtgggcaggcacacgagtttattcctgagaggagcgtgttgccacagcctctgtggactggagccccaggcttcagaaagagagggagcgcctgcctgtgggtggggggacaggagctgccaacctggcggggtcccagcgaagcgtccactgggccttctgcttgcccctgggggtggtggatgcatcagtgctgggcctgctccgaacccgcagggcaagcagcccgtgcgtcccgatgccactgccggccgccagcatcctggggaggtgggtcgcgtgtcccagagccctgtgcccctcgccaccaccatcctaggtcaggacttccccaggaagaatccaagtggctggagagatgcgggggttaatgccggtaccaccgcggttttaaacggggccgtgtctgagccgtgttcttgacgttctccagccagcagcagcagacgccacccggttgccccagccccagcggctctcgggcatagccggccttggcccgtggggcggctgatttacaggacagctgtgcacggggcctctagtgtccgccagagctggtgggtgagagtttttaaagcgctcgggacacttcacagaagaggcgcactggcccccatgcctggccatgtttctgggccctggctgaaaatcccgagcagcggagagaggatcccaacagggtattaatttaaccttccagccatgtgcttttgcttaagatctaaactctgaaaattaccagcctaatttagaatggaggcttggccattcgggacaccagcatcttctgagcgggagagatgtgggtgcccaccggcgtctcactcccacatctgggcctgtttccagtgacccctgcacctctcaaaggcgcaggcctgagttcacagagagcacttggccaagccctgcctctggggctccccatcgtctggctttgtcgtggactcatcatttctggatttaccacatgcttcaagctggaacagcaggaaggggcagttcctgaggcccagctgcgtccgcagagctgggggcgccatggcctaaggcaagacgcgtgccctggatgaaaatgactccagctctgtagtctccagacagcggttagagccccaccctccacggacaccgcctcctgccaccccttcaaaaaagtgttgcagcccagggcccagatattcaattttctaatgtaaaacgaggcgggtagggtttcccaatcaacatgagggcgccgtgtcctctgcagccccctgacttgcacaggcagtcctggggctctgccccatctgtgaaccctcagctgaagagggcagccccagaggcagccacattcaggtggctgaaggcagagtcctcctcccaggaaccgcctcggcgctgccaaggcctgtgcaccttcttcagcccgaactaaggagaatgtgcgggactgagagccatagaccctcgtgagccaggcttgagcgttgtcttcagatggggcccagtgggcctcactgttgtgacgactgaatgtgacgtctggggtgtaattccagcgtgacctggtcctggggtgtcactccagcgtgacctggttcctgaggtgtaattccagcgtgacctggttcctggggtataattccagcgcgaccttgttcctggggtgtcattccagcgtgacctggtcctggggtgtcattccagtgtgacgtggtcctggggtgtcactccagcatgacctggttcctggggtgtcattccagcgtgacctggtcctggggtgtcattccagtgtgacctggttcctggggtgtcattccagcgtgagctgtttcctggggtgtcattccagcatgacctggttcctgaggtgtaattccagcgtgacctggtcctggggtgtcactccagcatgacctcgttcctggggtgtaattccagcgtgacctggtcctggggtgtaattccagcatgacctggttcctggggtgtaattccagcgtgacctgctcctgaggtgtcactccagcgtgacctcgttcctggggtgtaattccagtgtgacctggttcctggggtgtaattccagcgtgacctggttcctggggtgtcattccagcgtgacctggtcctggggtgtcattccagtgtgacgtggtcctggggtgtcactccagcatgacctggttcctggggtgtcattccagcgtgacctggtcctggggtgtcattccagcgtgacctggttcctggggtgtcattccagcatgagctgtttcctggggtgtcattccagcgtgacctggtcctggggtgtcactccagcgtgacctggttcctgaggtgtaattccag

SEQ ID NO: 227 - DNA, 2935 bp, Homo sapiens
gaattccgggccgggagaaccgaacccctggcggccgcgaccccggctcccgccccggccccggcccgacccgccatgacggggctggaggaccaggagttcgacttcgagttcctcttcgagtttaaccagcgcgacgagggcgccgccgcggccgccccagaacactatggctatgcatcctccaacgtcagccccgccctgccgctccccacggcgcactccaccctgccggccccgtgccacaaccttcagacctccacaccgggcatcatcccgccggcggatcacccctcggggtacggagcagctttggacggtgggcctgcgggctacttcctctcctccggccacaccaggcctgatggggcccctgccctggagagtcctcgcatcgagataacctcgtgcttgggcctgtaccacaacaataaccagtttttccacgatgtggaggtggaagacgtcctccctagctccaaacggtccccctccacggccacgctgagtctgcccagcctggaggcctacagagacccctcgtgcctgagcccggccagcagcctgtcctcccggagctgcaactcagaggcctcctcctacgagtccaactactcgtacccgtacgcgtccccccagacgtcgccatggcagtctccctgcgtgtctcccaagaccacggaccccgaggagggctttccccgcgggctgggggcctgcacactgctgagttccccgcggcactccccctccacctcgccccgcgccagcgtcactgaggagagctggctgggtgcccgctcctccagacccgcgtccccttgcaacaagaggaagtacagcctcaacggccggcagccgccctactcaccccaccactcgcccacgccatccccgcacggctccccgcgggtcagcgtgaccgacgactcgtggttgggcaacaccacccagtacaccagctcggccatcgtggccgccatcaacgcgctgaccaccgacagcagcctggacctgggagatggcgtccctgtcaagtcccgcaagaccaccctggagcagccgccctcagtggcgctcaaggtggagcccgtcggggaggacctgggcagccccccgcccccggccgacttcgcgcccgaagactactcctctttccagcacatcaggaagggcggcttctgcgaccagtacctggcggtgccgcagcacccctaccagtgggcgaagcccaagcccctgtcccctacgtcctacatgagcccgaccctgcccgccctggactggcagctgccgtcccactcaggcccgtatgagcttcggattgaggtgcagcccaagtcccaccaccgagcccactacgagacggagggcagccggggggccgtgaaggcgtcggccggaggacaccccatcgtgcagctgcatggctacttggagaatgagccgctgatgctgcagcttttcattgggacggcggacgaccgcctgctgcgcccgcacgccttctaccaggtgcaccgcatcacagggaagaccgtgtccaccaccagccacgaggccatcctctccaacaccaaagtcctggagatcccactcctgccggagaacagcatgcgagccgtcattgactgtgccggaatcctgaaactcagaaactccgacattgaacttcggaaaggagagacggacatcgggaggaagaacacacgggtacggctggtgttccgcgttcacgtcccgcaacccagcggccgcacgctgtccctgcaggtggcctccaaccccatcgaatgctcccagcgctcagctcaggagctgcctctggtggagaagcagagcacggacagctatccggtcgtgggcgggaagaagatggtcctgtctggccacaacttcctgcaggactccaaggtcattttcgtggagaaagccccagatggccaccatgtctgggagatggaagcgaaaactgaccgggacctgtgcaagccgaattctctggtggttgagatcccgccgtttcggaatcagaggataaccagccccgttcacgtcagtttctacgtctgcaacgggaagagaaagcgaagccagtaccagcgtttcacctaccttcccgccaacgttccaattataaaaacagaacccactgatgattatgagcctgctccaacctgtggaccggtgagccaggggttaagtcctctcccaagaccatactacagccagcagctcgcgatgccacccgaccccagctcctgcctcgtggccggcttcccgccctgtccgcagagaagcaccctgatgccagcggcccctggcgtgagccccaagctccacgacctttctcccgctgcctacaccaagggcgttgccagcccgggccactgtcacctcggactcccgcagccggccggagaggcccccgccgtccaggacgtgcccaggccagtggccacgcaccccggctcgcccgggcagccacccccggccctgctgccacagcagtaaatgaaataatacgaaatgacctctccagcacgagcacccactcctagttgccacattggagcactcagttcagcaggggtatgctgacttcagcagacaaagacttttgaataaataaactgaactcacacctggtaccactcagaacctccaactgactgaatgccaggagctgaacattaatatgtgcaaagattggctctccaacaagaaggaaagcagggaggaagggagaccactgtgtcgcctggaggagaagtcatctcatgacaacagaagggaggtggccgggctgagcacggagacccaccgtgcaggggcctttcatgggaacggcccacacgcagtttgaccccacgcccagcccttctggcacccctggggttcaatactggaagtgccttatttaaccagaccatca

SEQ ID NO: 228 - DNA, 2439 bp, Homo sapiens
atgacggggctggaggaccaggagttcgacttcgagttcctcttcgagtttaaccagcgcgacgagggcgccgccgcggccgccccagaacactatggctatgcatcctccaacgtcagccccgccctgccgctccccacggcgcactccaccctgccggccccgtgccacaaccttcagacctccacaccgggcatcatcccgccggcggatcacccctcggggtacggagcagctttggacggtgggcctgcgggctacttcctctcctccggccacaccaggcctgatggggcccctgccctggagagtcctcgcatcgagataacctcgtgcttgggcctgtaccacaacaataaccagtttttccacgatgtggaggtggaagacgtcctccctagctccaaacggtccccctccacggccacgctgagtctgcccagcctggaggcctacagagacccctcgtgcctgagcccggccagcagcctgtcctcccggagctgcaactcagaggcctcctcctacgagtccaactactcgtacccgtacgcgtccccccagacgtcgccatggcagtctccctgcgtgtctcccaagaccacggaccccgaggagggctttccccgcgggctgggggcctgcacactgctgagttccccgcggcactccccctccacctcgccccgcgccagcgtcactgaggagagctggctgggtgcccgctcctccagacccgcgtccccttgcaacaagaggaagtacagcctcaacggccggcagccgccctactcaccccaccactcgcccacgccatccccgcacggctccccgcgggtcagcgtgaccgacgactcgtggttgggcaacaccacccagtacaccagctcggccatcgtggccgccatcaacgcgctgaccaccgacagcagcctggacctgggagatggcgtccctgtcaagtcccgcaagaccaccctggagcagccgccctcagtggcgctcaaggtggagcccgtcggggaggacctgggcagccccccgcccccggccgacttcgcgcccgaagactactcctctttccagcacatcaggaagggcggcttctgcgaccagtacctggcggtgccgcagcacccctaccagtgggcgaagcccaagcccctgtcccctacgtcctacatgagcccgaccctgcccgccctggactggcagctgccgtcccactcaggcccgtatgagcttcggattgaggtgcagcccaagtcccaccaccgagcccactacgagacggagggcagccggggggccgtgaaggcgtcggccggaggacaccccatcgtgcagctgcatggctacttggagaatgagccgctgatgctgcagcttttcattgggacggcggacgaccgcctgctgcgcccgcacgccttctaccaggtgcaccgcatcacagggaagaccgtgtccaccaccagccacgaggccatcctctccaacaccaaagtcctggagatcccactcctgccggagaacagcatgcgagccgtcattgactgtgccggaatcctgaaactcagaaactccgacattgaacttcggaaaggagagacggacatcgggaggaagaacacacgggtacggctggtgttccgcgttcacgtcccgcaacccagcggccgcacgctgtccctgcaggtggcctccaaccccatcgaatgctcccagcgctcagctcaggagctgcctctggtggagaagcagagcacggacagctatccggtcgtgggcgggaagaagatggtcctgtctggccacaacttcctgcaggactccaaggtcattttcgtggagaaagccccagatggccaccatgtctgggagatggaagcgaaaactgaccgggacctgtgcaagccgaattctctggtggttgagatcccgccgtttcggaatcagaggataaccagccccgttcacgtcagtttctacgtctgcaacgggaagagaaagcgaagccagtaccagcgtttcacctaccttcccgccaacgttccaattataaaaacagaacccactgatgattatgagcctgctccaacctgtggaccggtgagccaggggttaagtcctctcccaagaccatactacagccagcagctcgcgatgccacccgaccccagctcctgcctcgtggccggcttcccgccctgtccgcagagaagcaccctgatgccagcggcccctggcgtgagccccaagctccacgacctttctcccgctgcctacaccaagggcgttgccagcccgggccactgtcacctcggactcccgcagccggccggagaggcccccgccgtccaggacgtgcccaggccagtggccacgcaccccggctcgcccgggcagccacccccggccctgctgccacagcagtaa

SEQ ID NO: 229 - DNA, 51705 bp, Mus musculus
  misc_feature (30574)..(30593): "n" at positions 30574 to 30593 can be any base
  misc_feature (33640)..(33862): "n" at positions 33640 to 33862 can be any base
  misc_feature (41890)..(43443): "n" at positions 41890 to 43443 can be any base
  misc_feature (50508)..(51705): "n" at positions 50508 to 51705 can be any base
aacttttaataaaatatagttgcatacaggtgaatatagtcttagcatacaaataactggttttctctaaactgtagcattcctggatgctttgtgaaagagattgggtcttttcatggaagtgtggggagagggaagaaattacttagagccactgaactcttgatcatggattccttatttaaggattcactgtttcttgatcttggggtgaataacccagtcaatgtgttgccttgcaagcatgaggacctggggtcaaccccatgcaggcctacagaacaacaccagtagcagcaggcatggtggttcatacttctcagtcctggagaggtttgaacacagggattcctggggcttcctggccagcctagcctgttcggaaagcgccatgccagtaagatagcctgtctcaggaagcaagacagatggagggggtctgaaaaacaaaagctaaggttgatctctgttggatgtgcatgcacacacacatacacacacacacacaaacatataatccacactcgcatgcacacacacacacacacacacacacacacacttcactaaaatgtatttgcaagtctagtcagttatagcactctgtcattttttgtggacatgcacggaatgatttcattctgtttctgtgagaaaacctgaccaaaaagcaacttctggcaagaaaaaggtttatttggaccctttcaggtcccagtctgtcattgagaggagtcagggtgggaacttaagcaggagcttgaaatgaaaccatgtaaggatcctgcttgctgctcacgttctgacctgtgcttctgtagttctcttatacagcctaagattgcttgcctagggattgtgccgcccatggtgggcaggaccttcccacataaaccatcaatcaagacaatctctcacagacatggatgcaggccagtctgacccagacaatcactcaatcgaggttttggatgactccttgcttgtcaacttaacagatgaggttagctaaccaggacagtggccctcttcttgtctcacaacataaacagtgcccattttcttgatctatttagggccacgttttaataacagatttttttccgtgctttttgttggtgccatccctactgaaaatagtcctaagcgtggggctaaagtgctgcctactgtccctaaacacaaaaaggctgctatgtgcttcattaagtaaattcccatgttgggtgagattcttacaagtattggagtcctgcccagaactcaatgtcagtgtattgacaatggatgggagttgtttctttaaacagatgcatatctgctacaaggttgttccttgtctggctggcagaagtataatcaggggatctccaggattaactttaaaagttccctgagaaagagtggttgaaattttgtaaattctagcacttctgtgggaagtatctacggctcatcataggaagtaactatatttagtgtcatgcattggaaagtaggaccaaggtcaggggaatggatgaaatggagagaggatgtgtgagccctgatgcttgtggtggtaaaataacctgaacactggggttcatccctgaccctaaccacagtagatggtaagtcctaggttcagatggtgctgctctgaggggatctaggcagagtactctggcccctggactttctgtaaacatggagaagtgaggggagataggggtaggctggcagcatcctggaacacaccctcagccatgtgcaacttctttcctcacctcagttctccttctctcttggaatctgggtaccagaaagtcttctccaggctaccagagcccagaccactggtttgttgacagtatgtcgagatagttgttagtcgctggttgtgcctctggtttgcctttgggtatctgctttgggtaccaggatctaaggagctgcctgtgtctgccctgagaaattcaattctttaattagctcaatagccgggcagacacggctgttgctcagtgtctctggaggtcattgactgacaagatagtactacattggtgcctgtgataagacaaaggtcacacagtcctccttagtcctgggactggggaacaggcatgtgattgtctaatgggaaaggaaggtcagaagtcagttggtgagtaatgtgcttgctctgcagcatggagacatgggctgacaatcacccatgacaagggcagggctggaaaacgtaatccctggtctagggaagtaaagctaggcagagccctggagctccgtagccagtctacccaagccagggagctctaggtttaatgatagattctgttacagaaaacaatgttaaaaaacgagaggaagataccagatgttatgtgtgcatagattatgtgttctcactctctctctctctgtcttctggctgcctctctctcctctctctgtgtctctctgtctctgtctgtgtctctctcacacacatacatgcacacacacatgcacacatgctcacatacatacacatgcacactcgcacgcatacacacgcaatcacatgcacacattagtgcgaaatgattccccgtaactggttatgactgctgaccaatgctcagggctagcagagggagaggaaaaccacccagcatgtaggcagcttcctgaaagcgttcggcttcctccattagctaaactacagctttggaggaacggcacctttaggtaggaagagtgccttagccctttgatgtctgcagtctctaagcgcaagcccctctcatgctccactctgcacacccatggagtttgcttgacaaattcaggcagccattgacctctccctatagcagagggaggtgagaatcaactctgagggcttcagtctgagctagaggcacactgacagctgccatgcctctggattcagcatttctttcctggagtcctagggctcccaggaagccagtcatagactcgtgggcatctctgaggtgggtgtctgttagtgtctgtaagactgcaggaagtgtgctctggttagcccctggcataaacctagcaaggatctagcctgtgaagaagcatggccacgctctggacttgaccggtacagtgttctgagggtgggatgacaccatttggtacccaactgtgttctgagggtgggatgatatcatttctgagcatcctgatgtgtctgtccctgtttggtgagcacctcccttcctgaaaatcatgtgtttctattcctcctctttatatctgtgaaacccactcttcctatctgcgcagagcttgccatcccaaggtgccagttgccatggttcccatcttccatgcataatcaaagcactacagtcgctctgacactgccctccatagtcataggagagctggggaggtgcacaggtgtcaaggtactgcagagccagacaggacacctgcagagcttgcgtttagcttctgctctgcatccctgctgccttctaggcttagagagcatcatagccaagagtccctctaggcctcctgacctctgctgttgtacagcaccatgcttagagaaacagagctggcatcctcctcagattggctgctcctgcttgcaggagtccatcaggagccagtcagtggactgcaacctcagagaaggaaggtgtggttggggtcactggaccctcaagcaatactatagacacccagcctagtcatctgtaattgtgcccctacctatgtgtacatatggcttggcatctcagggaaggggtggagtgtgtaggatgggaaagactagctagagaatgggagttctagctatgtagccatggggaagccatcatccatgctgggtactgatcttctagtgtagttgttttagggtcccctacccataaaccccttggccatgttctataactaagcctaaaaaacccgttggtcgcttagagtgaatttttgtggactcaaaattctttggacccttatgaggaagggggagatgtttatgtcatctctggggaggagtttccacaacgtctgctcattgttgaaaatggtcttcaaataaatgagggtacattgagttattttaatagattagtgaaaccaaaggttctaagacaggctgcatcaaatttgtgctcacgtcactgcaactaatctagtggtagtagaagagaagtccccccccaccctaaacacacataccaaggactggtccagtctctctgtcaagactacccaggctgagcagctccgagatgctactgtgaacagttctagagaacctaatgggtgggatggggtggcaatgcagatgtcctcgtatgtaaatagagggtgaggagggtgtcaagaccacatgtggaagagaaacttctcatcattctccgggagcttagggcagatgctggacagctgggaccatccccagctgtgtttgttgatccctggcctacaccaaggagatcagagcagcagcttcagggttggtgatatatatatatatatttatttatttaaagaagcttatacaacatgaaattatgtggggaaattaagaaaaatatgcacatgctggagatactgacgaataggaagaatgtattgactgcctgtaggcaggcctttgaggtacttaagaacaatatatgccaatgatgtcctagggcttcagagaaaaggcagggaatccaatgagacagcctttcattactgaagcatggagcaggtgacagaggtcccttccttgaaaaaaccatgagtttgtgtaagacatgactgagctccatcaacacagacactgggctagacatctggacagctggtgcgctgctctccaggatcctctggacttatacaaattgggcttttagcattttcattaggaaaatagcctatagccacagtaaactctctaaagaagagcatgtgtccgttaggcacatagtttgtggacatctggtaggccctgaaacatgagccaccgagttaaagtgtccagacctttgaaacttacattttcatataaggcaaagatggaagcaatctataagggaaatggatacttaagtgaatttaaatgaggatgtgttggggatcaatttgagggctaaaggcacacactgaaaaatcagatcatgaggctatcaagggggatgggaggatcttagaccacaggcctgggaaggaggaaagtcattagcgaaaatgctgtaaccaagagaggataagcctgacatccgaggcctggaaggacaatgtgggacacagctggagtggctggagtcaggccaaggagggccttgtaggccggggctgtacttgctaaagagaaaatggacaaagaatgaggcccagaagagaggaccaggtaaaactgggaggtgggcattacacaggccgtgttgggaatgggtgaagagcaccagtggcttggggagccatttacagactctgtgttgctaggaaactccctcaagacccttcagccattggccacattggtgaagattgggactagtctactccatgtgtgtccatgcttagagagagaacaatcttttatgactctagggatgatctatggaagacaggagagagggaaggctcaaaacactcttcagtatcatcttcactggctattgcagttgctatcacctcttttagggaagaaagcaatgtagtggtccccccagatgagggttcagggtaaggagtggagttgggaaggtcgagctacctcttgggcatccaagagtaatttagatgaaccaacacatagggttgacctcactagaaagactggatgtccatttaatcagcaaattacggtcagaaaaaaaaatgaatgaccctccaccaaacatcaagagctgctccaggcatggaggaattatggttccattcatatcttccacagccagctctactgatatgttaaagggaggtcaccttgttacactggaccatggagaagactgaagcagggaggggagacaaacaccaaggggatttcaaaatatgaaagaaaaaaaatcccctcagtctgggtggtagcttagtgggtagggtgcttgctttgcggggacaagggcttgagttcactaaccagaacccatgcaaaagagctaagcttggtggctcacaagtgtttgtaatcctgcagggagtcttcagcactagttctcactgggaaggcagcaaggaggccagagtttatttatctttggtaattcctctgcgcataactctttgcttttccaaggccaaaagccattggcttccagctacaaactcttgctagcagcagcagagaactgagaagaaaaatggcttaatagcaagtgcttctctctcaccagctcaggagctcctggctggtcaggggagaggctgggagcttatcaactctttgtgaaccagaaagaaaagaaaaggaagaaagggagacatcagtcacacacacatgcagactttggatgaaaaaagaaaagaggcttgattcacttcacacacacacacacacacacacacacacacacacacacacacacaccttctgattgggcccgactaactgtctcaactccacaactgttcatgcatacttacatacagacatctatacttatatattcatgcacacacacacatacacacatttagtagagcaaaagctcccatgagcaagttccattgagaaagtgccaacacagaaaaaaaatcacgcattctggatgaaaaataaactccaatctttattgctcagaaaaagaagaggcttctgcctttttattgctgaaagtaaggaaaggctcataagtaagaaaatctcatcctctttattgctgagaaaaatgcctcacccacccccctctcttgctgaatgaaagaaggcttgtgtcctactgacatcgttcttagttcttacactttctcaggagaatagatggcatggttttccaagcacctttacattctgaaaagggttcatagcgagttcaagacactaattcacgtcaataaatcgaacaagaagttacagcaaacgtgtttccatgtgtttccattaagactagtatctaaataaacattcactatctagcttctagatccataagctcattaaaagtttaaagcaataattcttatggtgtaagttagcatggttttgtcaagaggcaaattatttgccttgtgtctcattagttttgaagtttgtataggtaaatccagtcaatattttatcctctgtccttttacctgcagtaaatttcccttcccagtttatgaccttcagttatcagataatggtttctcagcttgcctagagggaatatttttttcctcatcataaatttgttgtaaccctgcttccttatcttagtgcaattagcctgtgacacatgaacagttacagaactctaattgcagcttccatacaatagaggattcaaaattacttgtataaatttaggaattctatataaccattataatcattattaggaattacaaaatcatcggtttgtctacatagcattactacaagagagtacatcctgacggatctgcagaaaatctgcccaacagactccagggtgcccaggagtcattagaatacgcaataatgacaggaaatctcttgtagtcttgcctttctgagctcacccatcacaggccatgcaaaaaatggtggcccactccaggaaagagacaggaggatcttgggatttgccaacccgccagactagagtatctggcaagctccaggtccaataagaggactgtttcataaaaaaggagagtgattgaaaacagcctctgaagttgacctctggcctctaaatgtaaacatgcagaagcatccacatgaactagcatgtgtgcacacatacatttccatactcctaaggtcttgcatgcataatttacatcctacaaggcctcaaaagagtgagagatttactgtgttctgatggctccccatatacctcacggcagcagagctacctgtaaggtgtgtgcagaggtaagtactggccaactctgggcacaggtacagtgaggtggagtagggggttgctttgtcaggactggggtcttactactttcctcaagttaatgcttttacaaagtggcttcacacacttgtcaatgtcaaactgcgcaaagatagtgttgcactgagaaggaagagcaagtgtctcaggactgttgagggtgataacagcattgtgagctatgaactctctctgccgtcagaagaggggagctcagatgtgacatgcaagccacagtggttggtacaatgagttcagtggtgcctggaggagcacacgtgtcaggacaccatgttacctgtgcccacatgacatctttgagttgtgcagccacatgggggaggatgactttcagagagaaggctgttcatctaactccatgtggcatgagttacacagcatatacacatacctcacatacacacaccaccgtgtgcctatgtgttcacacggtggtgtgtgtatgtgaggtatgtgtgtatgctgtgttaagtgtgttcagtgtgaggtgtgcttgtgtgttctgggtacatgcactggctgtatatactgtatgtggtatatgtgggctatatgttatgatgtctgtgtgctgtgtgtacctgtgatgcgtgatgtgttgatggtgtgtgtaccatgtggtatgtgtgcatgtgatatacgatatgtgtgatatgtggaatatattacgatgtggtgtgtgtgtgtggtacatgcatgtggtatgtgtgggatatgtgtttacagtatgctgtgtgcatgagaggtagtttgaaaacaccgagaggtaaatgctctctccccaggtgaaaggatttccttgtccagcatattccagacgaccagcattttttacttaaacatgctttgaacactttctgggtggcgctgtgtgtcttttccattcacaattgtgtccatgcattcatttctcttctgcagagtgcgttcctcagaggtagcatctccccatggcaagctcctcacacacctccacctactgactgatcatctgctatgcaggggaggtgggccgaactgtccagggctctggatgtttctcctagtggcacccaaggctggagagggcactctgggtagatggcactggttataactcagggagccacttgctgctctttccaccccaggcaggagatgagaaagcctgtggtaacgaggccacacctatggctctctgagatgtgactgcaatgcttgtttatgtgaagtaggctccacagccttgggatgaagctcatctgtaggatacatttctagcattcgtgaagttcttggttataccccagtaccatataaaccacatgtggtagttcgtgcctctgatctcaaactggggagagggaggcgggggaattagaagttgaaggtcatccttgactacatactgactgagttcaaggtcatcttgggtaacttaaaacccaagagactgaggagggatgcatagcttttcttagcccgttctgtgcctactggggcccaccgggggctttgagttctcactggttctgttccgtggaccactgtctaccctcagggtactacgcccttgaggactgtgtccaaagactactgtgcacttctctttttctcagtttcttcttagaattccttgtattaactagaaaaaaaaaaaagaatgatagtgaattgggtcaccttcgtcaaaagccgtgggtttggttagctaaccacaggatgtgtgttgggagaccgtgggaattaggtaataatagaaagtaccacacaccaaacacacacaccagtgtaagcactctaagcttgtatccctgtggaaacggttctggtagtcatagccagtgtctcttgtggtttgggttctgcattgtgactctcccgtctttgtgggccccaggtacttctccatacacttcccagaactctgaaggggtgcagacatggcgggaagtgctgtggacagcgccaaccacctgacctacttttttggcaacatcacccgggaagaggctgaagactacctggtccagggaggcatgaccgatgggctctacctgctacgccagagccgcaattacctgggtggttttgctttgtcggtggctcacaacaggaaggcacaccactacaccatcgagagggaacttaatggcacctacgccatctccgggggcagggcccatgccagcccagcagacctctgccattaccactcccaggaacctgatggccttatctgcctccttaagaagcccttcaaccggcccccgggagtacagcccaagaccggaccctttgaggacctgaaggagaacctcatcagggaatatgtgaaacagacctggaaccttcaggtgagtctgctgggcttgagcccacagagttctctaaacatattcagagcctgtgcctcctttacccaaagactaggatagcagatgcctgtgtgctgctgcccctcgctgcctctcttcccaccccatctgctcatgggaccaaagcggagtcctcacatcctctctgccctcctcctttcaccacgaaggagaaggttgtgttttaactttattcctttgagtttttcttctttgaaagtccaactctggctattcattaccaagatctgttgttctctcactaggaaggaaaagggaaccagccttctccacacttaatccatctccatgttgttatttccaccttgtttcttcctggtccaggctgctggccagggcctcctctgatggacttcctgcaggagtgttggggtaggaaagatgggaccgacgacatggctgaaccctgatagacatgaagccccaggtgccctccttacacatgtcatccttttaaactttctttagttgcatgtactgatttcgtgtgttggaggcgggtgcctacaggtctacagcatgcatgcggaggtcagacgacttgcaggggtcagtctctcttccacctcatggagttccgggagtcaagctgagacggccaggctcagcagccagcatctttactgcggagctgtctcaggacccccaacctcacacacatcttatagctccttggctgttatgaaattaccaggtttcacactgaaactagtttgagtatagagctttggagtatctattctcttagcccattggtttatgatctatatattcaaatatttgtatggcttttcaagggcccatctcttcattccgaagcatattcctttatttatacacttgatgacatgcaagtaatatacaaaagtcttattggttttcttatgaatgagagaaagatgatctagagggaagcagagtttggtgttgataggacctgggacagatgggtctaatgtctttctacctggccagctcagtctctctccattcactgcagggccaggctctggagcaagccatcatcagccagaagccccagctggagaagctgatcgccaccacggcccatgagaagatgccctggttccatggcaacatctccagagatgaatcagagcagacggtcctcatagggtcaaagaccaatggaaaattcctgtgagtgacaagccatctccctacctcctcacccagagctaacagcttccccagttagaacccaggtggcctgggaaggtgtcacacaccatcatctaccaacacgggagttgctgtcacttgtgacccagcatgtgttttatctagcctgcccgtaaagattgataccgtgcctaaagaaaatggtgttcagtcccacgagggttgggtatgttatccgtggtgagagcagaagttctttggattggaggtattttctgatggaggaatatttgcacacatgtaacgagaaatcttagtatcttatctaagcctgccctagaaattcatttatgttttagaagcacttgatgcttataatctctaggcaatcaatttcctgtgtgtgtaggttttcctgctaatgcatgtaaatgtatgtgcacctgtgaatggaggtcagaggtgtacgttaggtatctctacagttgctttctaccttatatatcttagtatctccttcttatttcttattgtgcgtgtgcatgctggtgggtggggagtacttgtgccacagttgaggtcagaggacaacgttcatggagtcagttctccccttccacctttacatgggttccaaggattgaatccaggtcaccaggcttgtgcggcaaccacctttgttcgctggccctcccttccaccatgtattttgagaaacagtctctcaaagaagctggggtttgctgatttgtctatactgactggtcagcagccctcccccccccccccaggaatcttctgtctgaacagaaatagttctgtggtcttcagtctggacagctcaataatgtgaaggcttggatcttggattcttgacctgggtatctgcagtgggtcagtgtgagcctaaattcagaaggttctggagcaaattgggcagtgtaactgagcagagtagtagtctggggtgcagagaggctgggagctgtccttgtgtggttaagccttctcatgtaacgatgcacctgccgagggagtgctgtaggaatgcctgcatttgtcaccccatgtccctacacagaggccttctgggaaccaccaccccattccttccagtgaaacgttcttagattcaggggtgtggccttacagtcaggcaacatgatcagtatcaggttgtcttcctagaaatataggtgtttcctctgcatttgcatctagctaaagaattttctcttacttctgatattaaaaaaaaaaatttaaggtgctgaaaagatggcccagtagctaagagcactggctgtttttccaaaagagccgagttcaattctcagcacccacgtggcggctcacaactgtctctaactccaatcccaggggatccagtgccctcttctggactctgcatgagctaggaattcatatggtgcacagacacatgtgcaggcaaagcacacagagacgtaaaaaaagaaaagagtaaaatgaagattatttttagattatcttaatcatttctctttttaaaaaccttttgttggttctttgtgacttttaaatcatgctccccaatctctcttatctcccccttcccttgtaccctcccccaccctttcaaactccctgccaacagaggaaaaaaagatctcatggaagctgtagtatgtcacagtgtgtcccagagcatacccttttgttcacacttctgtgcttgcaaatattcattgcaatgacttgttggtcttgtacaaagcctctggcttctgctactctcttaacactggaacctcactgggattcctctcagatatcctggtgttgccctatgtcatggagatcctgtagctttggatctataggaccagcccggcagttcatagatggggtacatgttgggatgggccattcaaagtcccgaatctgggcaggtatcttgtgtgtggctgttctgtgagtataatacaagatgcacaggtcactctgtgtgccatcttccatgccacgcatgctaagacagacccgtgtcctctcagtcctgtcatgaggtactcggcaaggtctctgtgtcacttctgtacacacccctgctgggtgtgaactcgtgcacagagcacacctcatccatctccactatccgtcttgttcttagtgctcactacagcaaggagaaagctgagatggccacacaggagatcttggtagaaacagaagactggatctgtttatggtccagtgtacagcaagtcctccattttgggatgggatgcactcttgaatcccgtgttagtagtaatgccctgctgccttctctcaggtgtgagcccagaaggttctggaagccttcccctcttctctttccttcctcaccctctgttcatttcccaccgtaatttcccagctgcctgtggaggaatgacagggaagaccaagtcaacgggagtaggcaccaaagctccctcctcactgaaaagcaagcacagcctacctgcactcacacggtttgaagtgccactttgacaggccagactctttaccacatccttcatcctccgaggccccttcacactgaggaattcaagagtgaataaaactttaggccttcagcctgagcctacaggggctgctgacagaaatgcacaaagtataggagtctctagggcagctgtggaggcagcaggctaccattgtattcctcagagctgtaaatttcctatttgtgctgtcatcaagccaggaagtcactcaactgctgtgtgagccacagttcctattttctgacttgtgacatacattgtgcaaagaagaagaacaaaaaggaacacagaagcagttattcattcaacaagagagccgtgtgtctgagtagataagcatacatcatcatgctttctacgtcagggaagatgccagccatccaggttcacatgctacagagcctgtgacacgataacatgccacttcctgccatggtgtctcataaaatatgtgtttatgtatatacatattcatgagcatctatgttcatgtatgcacgcatgtgtgtgtgtgtgtgtgtgtgttagggaggggtcagaagtcaacactcaatgtctctctataactttccatccattctgggtgtcttgggagcaaggactggcctcttgtcttcaacagctgtaatcttaacttgtatagtgttgcaacgggaggacctctctgaggacgtccaaggggctctgagagagaaagaggaggttagctgaggaagggcatgccctagccgaagaagtatctgtgagagccttagtgacccagtattgccagaacatgttgcatgtgaccagctatgggaagggaggtccctatgatgtcgtggcaactgtgttaaaacccttactttacttagtaatggctccagacgaagactaatgatgcccaagagaagctgcgcttatgtggtacttagttcagtaccctctagtttcaagaatctgctgggagtcaagttaagtgctccctgtagatcaatgtctgctttcctgttccaccatccacaatgttccattgtgaagattaactgggtcaagttcggagacaagctggggactgtggtagacctgtgctccctacatccaccgatgtttccaatcaactctaaagaacgcctaccttccccttgtccttcagaggaagtgtgggctccttactgcagcctctccagcctgcttaatgtctgttgcctctcctcccccatgtcacgtgggcctgtcaccatgtttcttctcatattaacttttgtttgatctctgtctaatctgtcctttttttgctcattaacttttaaaaaatagttacatctttcaatgtccagaaattaaatttggagtagggtttgtttacttttcacaattgttcctcggcatttttaggagcatctcgttggttggttgctgattcctgttttgtttctttaagcgttccatgcatcatcgctagtttgtatcccatctcatagttttaatactgagcatatccaggtatacatataattttcctccatgtctctctcttatccgatgcctcttttatcataactcatgtttacttacatctggggtgacctttttgagttcatatttggttgatactcatctgtggggatgcagaatgccctgtgctcaagtgctttccttcaggattcaagtggcggctgctaccctaaaggctggctcctgcccactgtagtgctggtaactgtgtttgtcctcaactccactaacactggtgtgtgtgtgtgtgtgtgtgtgtgtgtgtgtgtgtacatgcacatgcaaatgtatgcaggtgtacatgatagtgcatacatacagagggtagaggtcaaccttatatgttacttctcaagagccaaccacattgctccttcaaaaagtgtctctcactaggacctggggctcatcaattgggctaggtttcctggccagtgagtctcagggatctgtctctctccacctccctagtgctgggatttaaaggatatgccccctgccccaccctcgcttccatctcctcccacttgctcagcaagcattttactgactggactatctcctcctcagccccaagctcgtgctgttgctttcatttgccaaacaagtttgcctcctcaagttccagcttacggggtgatctatgcctacttttcaaaattatattgtgggcatcaaagaaacccttctctttgttcgttaaggaatgagacagtaactgttgtgagcctcctgggccacggcgaaagccgagttcagtcagtcagtcagtctgtcttcccacactggtatgggtgatcaaagcaggtcattcatttgatctgtgtgggtttgccaccagggcgatcaaaagaagcatcctagcccgtctgaagggaaagttcaaagacagccgtggactgatgtcagtgtcagtttactgatgctgctcagaggccctgggaagctggaagagaagccacaaaaaagaatctctacctagggactggagcagaaagacaaagagaaagcagcgaggggctgggtgtatgcctgcctatcttgtacagaccagctgtcagcctcaggagatagtccccctgggagctgtccacccatgagatagtccccgggagctgtccaccgagttcaccctggaacctggggcttgttgattatgctaggacatctactacctgcaagtcccagagatccacctgcctctgcctctgcctctgccttcccagcacagggactgtaagcaaaatcatgacacttggctgtgtttgtttgctgtttgttgtttggggagcttgctaactggcttgcttgtttgtttttgtttttctttggtggtggtggtgggggagggtttcaagacagggtttctctgtgaagccctggctgtcctggaactcactctgtagaccaggctggccttgaactcagagatccgcctgcctctgcctcccgagtgctgggatcaaaggcgtgcgccaccactgcttggcttgtttgtttgctttaatagggattctaaaggttgaactcagatcatcctggttgcaagacaagcacttttcctactgcaccctctccacagtgcagggagagatgattgtggaagatgtttcagaagacgcatgggtagagaacacaagtttggcatgcctcagatctggtttgctttagggaccgatcttgctttcaggatctgcacagacaacacccagtgttgctacttcaaggtgttggcaggcacagcgtttctgtaccaaatgtcacttattccaggatccctgtctcctgttttcctagccttcttggaaaggctactgtgcattcttagctctgagcaatgatcattttcccacctattattcccctctctcttcacctctctttccttcccctcctcttcccccgcccatcttccatcctctctcctcctgcccattcagacattttccctcccctttcaactctgaccccatcacagatgcccctggacgatagccacagagactgagtggtactcaggctggagtgaacctgctgtcctgctctctctgtatcagatgcagaccgcatccctagagttttacacaccgaagccttcagtatctcattatctcccaggccctccactcactgcctggtctcaccaccacccacacattcttttaccctggagggcacacaaaggtagagaagagggttaagcccttccagcaaaagtcacaccctcctctctcacatctatgaggggcaagttcaaggtctgtctgccgagcatgcacgtacatacacatacacatttcctcctactacttaccgaacttccctctccttaccgctcctcttaccctcccccttaccctccctctcctcctcctctctctctccccttaccttcccacttccccttcttccccctcctttctttctctctctctctctctctctctctctctctctctctctctctctctctctctctctgtattctatgcctacttatgtgtgttgatgtgcatgcccatgcatgcaaatgcagatgcccaaggaagatttccagaatcttcctctatcacttcccacttattcttctgaaacagggtctctctctgagcagaggctcactgcctcagctgggctggtcagcctgggagctcatagcatttgtctctctccaacctccgtcgctgggcttacaggcacatgtgaagatgtccagcctgatttaccgcaagtgttctcacccactgaaccatatcccagccccttacacgtgtgtgtgtgtgtgtgtgtgtgtgtgttttcacacattgtcctttctgcaagccagcacacattgtgaatggtttccctagaaaacaggctcaaccctttattcatatatggtgttttattgtgtgactgggcgttacccaatgaccaaccaggcttttatcagccacatagtcatcccaaaggagttggcacctcagggtgctcgtgactgactgtaggagggaggaggtgtttccacagtggtgaaatttcaaaacacaaatctacgatggcggagaagggtctttcacccttcaccagcttctctgagcttcaagcaggggcctggagggagccctggccactctgccaggcaagcgccatttcaaaagaaatcattcgtaaagttgcaacctcctcctactttgaggagatgggtatggcaggagaaagggaagtgaggtcacttccggtcccaaggcccagctcagcctggactgtggctgtggccttgatgttgtgtgcttggagaaagctgtacaaaccaccccagtttacagacacccttctccaggctgctgggacttgattgagctcttcccaagtccagtgcatttatgctggatgctctgaaaattcatcttccttcctttagcaaatgcagaggccacagaggcctcagggactcccagaccgcagatgtcccacggactcgcccttccccagatctcatgattagaacgcatgagttgctggaaaggcggcgaatagcatggcctcagaggaatgaggctctgaactgggagagtcacacctcctattgccatgccagccagatctcaccttctccggggccttcctaagtactgattcctcctatgatgtcaggactgccttgtgcctgtgtctcgaggttcaagggtgcacctgtatgttgtcactcgccatgggggcctgaagtcctacatgtagctcctggtaccagtggaacaatgaagtctcattcacctacagacgcctcaggccttgggctgtctctgttggctcatgccacgtggctatcattcccgtctcaggtgggggatgctacctgctaatgtcaaacaatgtcttaaacccggccttggcactgaagagaaagggaagaagaccataggagtagaagagttcataacctcctttgtgtgctccagaaagttctgttaacaagctcattagactcctcacctgtccttcacctgagtctaggggcttcacagacaccccaaagcctgtgcctgtggccctgagccacacccccccaagctctttcactgatctccaaagcgccatggccctgctggatctttgccatagtccatctccaacccttggcgtttccctctggctaactcgctggctctggtacagagccctcctgtcatctcgaggtctgggtgctgcgtgcccaccacctgcccatttgctggtgctggagagcacctgctgcccaccagggccaccaactgtagtgacggtactgcttcctaggtcaaaaggtcgcagtaggggtaatatggtgtgtgctctctctcgcaggatcagggccagagacaacagcggctcctatgctctgtgcctgctgcacgaagggaaagtattgcactaccgcattgacagggacaagaccgggaagctctccattcctgaggggaagaagtttgacaccctctggcaggtatgtctctgtctctctgtctctctctctctggactcacttctgtgtgtctctgtatctctctctctttgtctgtctgcctctctctctgtctctctagactctttctttctctggactctcttctctgtctctccctgtctgtctctgtctctctctgtctctccctccctcctggagggcacaatgcagacccactgggatgctagttccaaaactcttaggaacaagaggaggaacgaggctatctgtcccataccctccatcaacccactttctgatttctagaagacttgtgtgagaaatgttcacacagaccgtcatcaagtcaatgaagccacaaacaggctccgtcacctggttagagccataagttcctggtgcctcaagatcatgtattttagggcagcattaagaatttgacagaaggccatgccatcagggactggaataacatgtgcatgcatgcacacacacacacacacacacacacacacacacacacacacacacacacatactgtaactgatcaaacaaaaaccctagggactgtgacctagctggtcctggagctctgaaatgccagggtagacactgaatttcaggtgacatcccagtggataaccaatatgggaagcaccctcctaggcaagcatcctcatagccgagccaccacaggaagttaaaacagcttagaaagcaagtctactcttcctgggctgcagacagctgcctgtccaaagagcaccccatacctgctctgcaatgtgttctcaacctagctgtcagtaagcctcaaggcaactcaagcaccccaacattattcacccagctccccacatttgctactgagcacattccgcttccttaatttgatatcataactacattaactgtggatgcagaaggatcaaaagtagtaaattcaaggctagcctgggctacatagaaaaaatcctatctcagcaaataaacaaaaaattaagtcaataaaggactaagtgatggagatgctatggagaccccgaacccctaatgtatccctatctggctacgtgatggttattttttttaaactattttaaaattttattattattattattattattattattattattattattattatacataagtacactctagctaacttcagacacaccggaagaaggcgtcagatctcattatgggtggttgtgagccaccatgtggttgctgggatttgaactcagtaccttcagaagagcagtcagtgctcttacccactgagccatctcacctgcccgtgatggttagttttagttgttaatttgataccatctaaatcacctgagaagagagcctcagtgaaggattgtgtagattagagagtgagcatatccatggggattcttttgattacattaattgatgtgggaagacccaggtcattgttgggtggcaccattccctaagcttgagttctggtctgtgtaagagcagagagtgctcactaagcagtaagcatgcatgcattcattcactctccactcttgactatgcatgtgaccagctgcttcaaggctaaaaagtttgttgactctatccaaggacatctttggcccatcccccgagtaccctgtggaaaagagactatctggggtttagatggttttaaaacctgtgagggctgtgacttatccgctgtctccccctctctctctcttaaccattttcttccctgtttcttttccagctagtggaacattactcttacaagccagatgggctactaagagtcctcacggtaccatgccaaaagattggtgcacagatgggtgagtgatcggcacagaagaggctctgttttgggggagctagccattgtcaacctggtgtcagatttgccaaactcacacagggtgaggcttcggctttaccgtgtgattaaactagatgtcactcaaattcttggaatcattagctgaaagataaccataacaaaaacaaacaaacaaacaaacaaaaactagaagattttgattgcatgtgtggccaggatgttggcacatatcttcagtcccagcattaaaaaagcagggtagggaatctgtgagttcaaggccactgtcagaccctgtctcaaagagaaaagcttacttggtggaatgtgtgaaaaatccagtaaaagagaaaagtacagatgcagaaagttgagtctccccagtatgttcccatcatactgatagatctgagaagtagatggtttgaacaaacacagaagtacacagaactgtaaccatgacatattctccttccaggccacccaggaagcccaaatgcccatcccgtggtaagtattctctgaggcgtctctgctggggaagcagctgtgtctggacacatgggaaggtcaggctttagtcagcacgggatggatactctgagcacatcccggaagatctgggaatccagtgagtctgagaaagcctcagcctgtgaccaccgcccagctagacgtgttttcatggtttctcggccgttttattttctcttcattctttggaagtatacagagtgagacagaaaccccctaggagatcagaaaatccaccggtcagatgtagaaaaggggaatatatcgtccacgttcagtcttgtactgtctgtgtgaactcgtgtgtgccatgcacaggtctgccaacatgcatatcagtataacatggccagcggataggtatctccttgaggttggctacccaacttctttggcccaaccaattgacaccttattactagggacttgacttaaattgatttgactaatgattaggggaggcagggaggggccacttggcaagatttcaagagaaaggtccagagaaggaaggagtcttggccagaatgcacattccactccatgccactcactagataagaacggagcccagatggccctgtgttgggttaaccctttcattgccatgccttcaaagagagaagaacctcaagtcccctctccatctgggatgtcggagctggtacttaggttacttcacaagagcatctcttctcatatctagggtcttcagcgagcacatcccagctcattagcaccaccagggaataattcttgacttctatcttgctagatgctaaaaaacccaatatctaccaggcacatgttctgtctccaacaggggcggttggccacttgctactgaacctgttcattccagggttagtacttcttaccagactgagagcccttgagttggctaacacaccctggagctttagggtcctctgaaccacagtgccccctggtggcctcacctggtgtttatcattctgtgcccttgagacagatctgtctaacttgtgacccgagggttgcgtatgtcccaggattgtgtaaatgaaaatgttatattgcaaccactgacaccactgaacagccagtgactagagtctcttgtggagtctgagacacaagatttccacagacaacgtggctgcttcttgtctcagctttaattttgtagccttcagtgggaaattatttattgaaaattcttgacctctctgccagaatgataggctcttctggaagcttctcaaatgatccggacttgcatgcaggaaatctccctggggcaggtgaagggagcgggcagggcatttgcagaatcggggccaggtagcatgtcatgacgaagaatatccttgcatgtgtttttctgaaactaaacgctctattcctctctgccgttgtggtttctagacttggtcaccgggtggaataatctcaaggatcaaatcctactccttcccaaagcctggccacaaaaaggtgctaaagcgtcccgtgcttgctgtccctgactgagtggtaggatagaccctcctgcagcccgtgcttggctggctatcctgtacccaatgcggctttgcctctgtgcctcccgcctgcccagctccgagcatacccgctgagcctcgcagccccatgctttgtctccttacctctctttacaccctgcctcctgtgctcctactgagccttgcagtccctgcacagtgcacacatgccctccctgcctgtggcttctccgtcaccgccgctgcgcagcctgtccacgttgccttgccctttacaacacgtacctccagtcacttcagtgagccccacctgctggctctcattccagagagtctttgcacgctcaactcaccttcagtgtccagagtcacaaggggcagcatcagggcttctgccacatagagttcttcccagtggaggcaaccaaggtccccaggggagctctaccccctgagacagcaggttgatttctgcattttgttacatggctgaattttgagggacagtaaaaaaaggccttcatgggaagatggcccagaggccaaaggcagttgtcaccaagcctgacagcctgagtgtgatttcctgcaactcacacagggtggaaggggaaagccagaactgactcctgcgagttgcctctgatccccatgtatgggccttgactcctacacagatttattttcagggtttaggaatcaaactcaagcgcttcaccactgagctgtgcccaagctcctggtttctgtttgtttatttgtttgtttggttggttagtctgtgagacgggattttactctgtagccaaggttgtctttgaacttaactccacctcccaagctccagacttataagaagtcctaccctgacctttgtgttgacttgtttatagtgaattacatacacaagcatgcacacacagacacacacacagacacacacacacacacacacacacactcacacgcacgcatgcacccccatatgtgtatatgtatgtatatgcacagatatatgtgcatatatatacacatatgtaatgtgtattatatacatctgtgtatataatatgtataggttgttctatcatatttatttttatcttctttaggtaaagattaactttattaatagttgtttcaattttatatcaatgttttttccaagcgtgtgggcatatgattaagccagtgtacacagagttgtatattaaggtatttattagcaacagacagcataaatgcccacgagttctactcagcaactatttgctctgttggccacttcctagagggtcctaaccctgatggccagagcacagcggagaaaggagcatgatgcttgaacaggaaggcagccatgttgtgctaagctcagtcagtgaggagaatgttagaggatagtctgcggctgcctggacctttctcagagcccgacacacccccatgtgattggggtagctcatggccagcaagcccagtgagagccaggcaacacggtacctcacaggctaagggacttaaacgtgcctgatgaaggaagctcttcagaggtgtccactcaggccagcagccactcacagactctgtaatcctgaatgtgacaccacacttaacaagcctcacagacactgcaagccttgtgtctccccctcctcaaccgactcttcaagagcttctgatgacaccctgtcattccacttgccgtagcccaaggcttgttgctaactcacagcccccagctctgcacagtcctggcaaggagtgctttcatcccagcatctcaagtttatcttttgggttcccccggagacatatcaaccagagatgctgtatgtacatgagcacacatacacatgtatgacacactcatatatacactcatacatggaaatatctgtgcccgtgtgtacatagtcgtataccatatttgaaatgcatatgccctgaatatgcaccatatacacacatatgcatctgcatagtatgtgtatttgtgtatgcatctattgctgcttacacatggcaaatggattgcctgcggatagctacacaaagatgtatttcaaggacttacagagttaaacagaccagttaagtgattgcaatgtccatgggagagattgtcaagcagaggggatccagagccaggtggaacctcagtggtgttgctaaagaaagctgctgcatggtaggggtcagcttcccttccccgcccccttttccctttccttagaaagtctaaacttacatctaagaatgctcacctgagtcaggcccatgtgagatcatcctcatgatggaagtcacctactaaggactgtaagcccatcagtgagccccttctcagcagcaggactgcctcaggctgggtcttctgcgtgactcagtactgaccactcaggagagccagttgtcatagcgaaagccaacgctgcagctggaagagatagcgcagtaggcaaagtgctcgtcacccaagcacgagcccctcagttcagatgcccagcacccaagtaagaagccaggcacagtggcacacggtgccatcacagtgctgaggagctgaggcaggagggcccctcagccagccagtctcgtcaaagaggcaagctccaggttcagtgagagaccttgcctcaaacaataaggtggtgaaggcattgaaaaagatatcggatgtcagcctctggcccccgaatgtccacataagcaatcgcacgtacatgcacatacatgtgcaggcacatagaaatccacctacgccatgtgcacatttttagagaagccgacaccaacaaagcccagtcaacaagcacttgaaataactctagtgtctagagagttaatgaaaactgtgctttgatcttaggattatcaatttaaaatgaaaccagggcggggacttagcttagtgacagagtatttgtctaacaaccatgaggctctagatttggtccttagcaccaggaggagaaaaatacttggaaagtcaaatacagatttttgaaataatgtatttctttttatcttatgtgcattggtgttttgcatgcatgtgtgcctgtatgagggtatccgatcttggagttacagacagttgtaagctgctatgtggtgagatggctcaacagttaagagccccgattgctcttccagaggtcctgagttcaattcccagcaaccacatggtggctcacagccatctgtaatgggatctgatgccttcttctggtgtgtctgaagagagaatgacagtgtaaataaataaattaacttttttaaaaaaataaaaagaggaggaagagaaagaggaggaagaggccaggttttaggtctttgttgtgagatcaaagaataattatacagggcatgtgctcatctttaggtgaacctaaccgcatcccaccttctgacagagtctgcccacatcacactgcctgtgctccttctgagactggagactgtagccagctgattgcagccagtgtcctggagccctatggcttctggcctctggggagggttaccacccacactgccaccaccgttgcctagtttgaaaatactggcaggaagctgggagtgaaagtcaaggtccaggaagcaaaaggcaagattgtggaagcaggacacagggcagaggctacctgctccacaggacagagggtgtgctgcagagctctggtgatcacgggcctagagagagagacaggcaagtccctggtgcctactgaccagccattcagccagtggagaccccgtgtcaaacgctagggtggatagttcctgaaagttgacctctgtccttcacaggcacatgcacacacacaactgctcacacacacacgcacacacaatatcatgcacgcacgcacacaagcctgtctaatgcatccccacttttaacacactgtgacagagtagttcgaacttgaaaattatctacccaaggctggattcctggcgccatctaggggccactagaagttgtgcataagtggaaagggtaagggtgaagctgtcagcgcttcctttacagctctgttctcagtgcagaacagagatgccagggagggccagaccaccaagtacaaagtggagagatggataacgcatgctagcgctgtctaccagcaatgcttctcacgacagctcacatttccctcccttcatctttcaactgaagctttgcttccagagctttcagtggtgacagtggagctggtagtggaggggaggagggttgtatcttcatctgcaccacaaagcagccaatgactgctctggccctgcccattccttctgcaggacactcaagccaggtgccatgattgtcccagttccctaggctgccacctaggtgcaggaggcaggaggtggtgggtcctaagggtgaggcatccagatgagaagggttatgaatctcttgggtctcaggggctctgtctggatcttgaatgcttggactcatagggtgctttctgttgggcagcatggaaatgaagcactgagctacatccacttaaagaagaatcccagtttccaagggaggtgcctgttttgtccttttgtctgtcatcgagacataggggtagctcctgtctatctgggtgtgaactccttccaggagctgggatgctcaggggtccctccccccactgatccctacgtccttttgatatactgccattttttaaaactgatttcctaagaccctcagctctgctttaaaaatattccaagagattttgttaggaaattgtgagtgctggtttattataacaagtcttttgaagcccccttgctccggagataattccagagagactgcatgaagcccccagttgagacactgagcggcagagggtagacgctcttctatccacgggaaggattacgcctgtcctccctaccctggggtgtcctttaacttcatgatggtcagattgtcttggggatctcagacatttcttgtgtacagaggaaaaaaatcaaaagacttaacatggtagtcacgctaaccggaaaagacatctggagactgcagctggatgatggtagctattatcaagtataaactagggtagttcttcctaggcagggcttctaagcaacagccaactctgctgaagtgatgtgtaaatgtttaagagggtcgctcgcaagagattgcctatgcttagttcccttcctgagagcaaagactgaagagagaattcatctcaaaccatgtgagtttacattccacatctccatcttctgaaaggtctctctgttcaaccatccaccatctatccacccacgcatccttctgtccatctaccaactcactgattcaaccgtccatccatttacctatctatccactcagccatccatttatccatccatccacatatctgtccacatacccatacatccatctatggatctgtccgtacatacacacacccattcacccacctatgtgtccatcatccatcctttcacacgtctgtgttgtgtgtttctccttagcatccgttaccagcgtggcccagctactgagctttgatttaatgcctaagtctgcataacttctgctctgttgccatggttagttctatcacacagtccttcgggagtgttgagagaggccaggagaatatggatcctgtgacatctgagactggatgtcctttggctttgctgaaagaggtctttcccacaggtgctggcagactctaactcatggttaacaccacgaagccagcaagtcgtagtgaccgagtgtgacccagctgctaaacattgatgggtggggttgtcacgtcagtgaggcgggtgggatttttgatatgtgcttcaagatggtggctgtgtaatgttagctgaatgtctctgtttctctacacttcccctcaaatctggcattatctcactacttcatggcaatgtgtggatgctgataaggtaagtagatattcaagacaagacagaaatgggaggagagagccgtcagagctggacggcggtttgcctgtgagatgggtttaatagccaccactttgctttaatttgtgagtaaagatgggccagagaaaagtttttaaaaatgtatcaaatagaactataaggagattcaccccctctgcctacttcatgaaacaaattgatattgatggatcgaatgagaaatctccgtgtataagggccagtgtgccttagtgaacagccacaggaaaaccagaagagttctcttccttcaggaagacagagagactgtctctttgacagggcatgtgcccgatgacattatcatggtccttatcacgataatgaccgaagtgcatggggtgggggtgaggcaggatacagccttcctctctgagacttgcagctggttggcctgggctaccctgtggtagcaatgccttggtgtctcaatctgtatggaaggcaaaacaggtggacacggtttgactttttaaataacttctgcctgacgttagatgaaagcagaaatgaacccatggggagggagcctgcgaggtcctgctattttctgggaggtgtgaaaggaagttctcttgggatagtcagaacagatgctcttccctccnnnnnnnnnnnnnnnnnnnnccctccctccctccttaaggccacttcaggggtgggagctataagccatgagcctgtctagccttctcaggtccaaacagttgcctgaagaatgagatgagcctttctgacctcttcctaatcctctgcctcccctgcttatgttatctgtgaacacttggaaatggtggcatcggggcagaaaaataacatcttctcatctgtgtgcttcagcctgccccaccccaagggagccgtccagagagcactgtgtccttcaacccctatgagccaacgggagggccctggggcccagacagaggtgagagatgaaagatgcacttttactcaattaaacattcgagcagggtacacacaggcttgccagcatgtagaggcagcttacaaattcctggcaccattccaactttgccttacagtgatggtccacactaaacagtggtgatatccaccagccacaggtagaaaatatcacctatccataaaacaagcagtcctgtctagtgaaaatggtcttttataattaaaagaagcaagcaagcaaacaaacaaaaaccctgagttgttagcatcggcagcatcatgctgtgtgtctggcacattccggggaccctggttgccattcttggaagaaaatgttgccaaagcataactgtaacctctgggtggctttgacggtaggcacaactcacagattcttctagatttgttcagggagctgtgatgactgggaggccacaggggacacagtgcaggagggcgcaggagacttgttcccagaaatgggttttttcggtacctttcgtaggttcatgagtgtctgcatctgattttctactaacaagattggggtttgtttgttgctatagttcgcctccgaatagaggcttaaagcaacaagagtcagttatctctcatttcatttatgccttgtggctggaggtgtgactcatatagggtgcttgtctagcatgcacggagccccgggtttcatccccagacccgcagaagccatgcatcgtgttgtatacaccgtcggcatcattgctggctttgtgttgagttcacggcctgtctcacatgagcctcagagcagtagaactccttagcatcttagaaatgaagcatgttggctttttcaagccttgagaagcacacatatcatttctcttgagctctgttggttcagttatgaaaagccaacaaggactgtgtcgttggtgctacttctcaataggagactgtcacagctggcttaaagtctaaggaaggttttatctgccattagtactggtgtagaagaaccatcttgtctcttcccttgcttcgcttctccgctgcatgcaactgtcccttagacggaaggagtttagggcagggtggcaagggttgtaatgtcacaggagtccagactggagtcatctgttccctgactacgttgcaggccttcagagagaagccctgcccatggacacagaggtgtacgagagcccttatgctgaccctgaagagatccggcccaaagaggtctacctggacaggagcctgctgaccctggaggacaatgaactgggctccggtaacttcgggactgtgaaaaagggatactaccaaatgaaaaagtaagcaccgttgactcattgcactgctgtcatcttcagtgtgagagtgcattctgaaaacttctcagaacgtacctacactgctcaattaatcccagacattggcgtccaagtacgtgtgtttattgcacgcacacacatacacattgcagcgcttatgtggtcagaggactcatcaattggttttctcctcctcacacaggttctggggattaagctaatgtcatcaggtttggcaacaagtttttttttttttttttttgtttttttaccaactgagccatcttgtagtcttcatttctgactcatttagagtaaaagcatcctttgtgtatgctaactgtggtgacagtagtgacatgtttgtattagaatgtagtatagtatagaaaacagctaaatagaaataagcaaattcataagaaaataaaaatatattctatctccagaacacaaatatctgtgactaaccttggtgtaggcatttattggatctttatatgttttgtatgtaaatggtaagtgcttttggtactcttaatagtttgctggtaatgtgtgtatcgtgtagcattttccatgtctagaccttatatatgaactaatattgattttacacagagatgtgacaaccggcaacacaactgagttcacttgtgacctgtagcagtttatctagctatcctttaatacagaaatgtgtcacttaggaatgccagatctctgtctttctctctctctgtctttgactctgtctctgtctctctctctctgtatgcatacatgtggtgggtatgactatatatgttcagatatgttcacaagtatgtgtgggttgtgagtacacatttgtgcaggtacaaatgcccttagaagtaataataataaaataataataatagtaataatagtaataataataatagttcctcaggccccgtccaccttgctttttgaggcagggtctatcactggaatctggagcttaccaattaggctatggaaactggccagagaagcgcaggaattcacctgtctctgcctccccagtgctgcgattatagctgtgtaccacaaacatctttttatatgctggggtcttgggggtcgaagcccagtcctcatgatttcacggcgagccctttacagactgagctgcctccccagcccaatagtgatactttttaaaagaaaaccatgtctactcctgatccgttgggtgtttgtcctcaccttggtgcattaactaagaattgtagagtagtgttttagaactggcaggagtcttgtgcctggttacagagagatcccagcattcctttgggtgtggcttatgtctgtatgatgactgctgtctgacagactgaagacatgctattttgttccgataattctgcaagttctttagtcctgcatctatgctgnnnnnnnnnnnnnnnnnnnnnnnnnnnnnnnnnnnnnnnnnnnnnnnnnnnnnnnnnnnnnnnnnnnnnnnnnnnnnnnnnnnnnnnnnnnnnnnnnnnnnnnnnnnnnnnnnnnnnnnnnnnnnnnnnnnnnnnnnnnnnnnnnnnnnnnnnnnnnnnnnnnnnnnnnnnnnnnnnnnnnnnnnnnnnnnnnnnnnnnnnnnnnnnnnnnnnnnnnnnnnnnttgtgcttctctttctttcctgtgatgagttacagccatagatttcagaccttaaacatgtccctccatcttggggtaaactccctcacctttgttcattacatctccttccataagcaactgaatataacccatgagtatttctcctagaatttttcctatctgtgctcatgaagtgtcctaattactgttctattgctgtgatgagacaccgtgaccaaggtaacttataaaaggaagcaattaattgggggcttgtttagttttagagggtgagtctctgaacatcgtcacagcaggaagatatggcactggagcagtagctgagtgtatatcttatttgcaagttggaggcagagagcaagaaacctcaaagctcacccccagttacagatctcttccaacaaggacacacctgctaaacattctcaaaacagttctaccaaactaggggcccagccttcggatatatgagcctaccgaggtttttctcattaaaccaccacgtgaagttatcagtcaattgctttcttacaattctcataatggagtcttactctcttacctgtaaaagagctcagtgcttggaagaccaggagtttcatagtctcttcctgggccaccgtaaacagtcaggaattggaacaatagtagcctcttagaattagtgggatattatctttcccctctgcttttctagaagacgtggtattttcttttttaaatgtctagaggaatcaagaaaccttttctaacttcttaatttagatccctgcctcacaccacagatgtaatgatagacccaactatgaaagccaaaataggtggctagagatgacagaatggagcctcccatgttcccgggagggcccagagaggcttctagggtgatgataatatctaaatcctcctgtcaggccacaggctgtgttctagatcaccacactagctgtgtgtactttcctgtgtgtgtgtgtcccactaattctgttatttgacctagtgtatttgttaggtgtgtgtgtgtgtgtgtgtgtgtgtgtgtgtgtgtacgtacatgcatgtggtttggggatcaagctccagccaccaagcttggcagagagtatctttaccacctgagcccccacacggcccatttcctgaatagttctgttttgattcatcggtttgaaggttcaacaaaagaaacaacttctcatgcttgtggaaattttaccacaggtaatttttcaaagcatacctagttaatgtttgttctttcttttaagccacattttgctagaatactttcaagagttcagcatgatccatgtgatgtttttgtgagggaataaaaaaaaatccatattttcgaaacacattgaggcttgcttaaaagtaaccaagcccagtgggagagaagtgtttctttctctttaactctgagcttgaacagaatgtgtgcttctgattgggcatgttgtgtacacacctgtggccccccagagccccagaggtagagacagggggatcagaagtttaaggtcatctcctactatacagctagtttcaagccacagtggattatgtaagacccggactcaaagaaaaaaaaaaagcaaagcaatgtatttttattttttaaattctgggcccagaggctcatttgcaatatcataaagaaactttgtattcctttatgcatgtaggcagaacctagctgggaaaccacatgacactgcagcaggctgtatgtgtgtcacaacaggggaactttgttgaagctggttgaatatttcacaattcggggctttcctcagcctggaccattctccattgctgtccactacaccggggttcacaggcagtggggcatggttcctctgtctgtaaaagaacagctgtagaaagaatctcttgtgtactgtatggaatcattaccatcatacagagcaccaaccacaaaccagagaacaatccccgaagtccaatttggggaaccagtgactgggcacgcatgtgggggttactcacaggagctgcgtgtgccgctgagaagtctgggcctcagtgtggatggtggcctctacaggatgtagggtcccctagatgccccctctcgggctcctgttagctttcacagtcgtatgctctagcacctcccaagaccgtgcgtctatgttcagttaggacaggatctcacacagatgactgggaagcgccggggggagttccaggaatcagggtaacagtccagtgagcatctccaccccttccttatatggaggagcaccagcatttgaagctggtctttcttctctcttgcaaaaggcatagctgatcagatggaaagagcaggtgttatattcagaggacgttaaagatgatcttaaaccaacgatcctcctgtatccacctctggggctctggggctcacaggtgagcacccccatggccggtctgaagcacacgagttgttcaagctcagagttaaagggaaagaaacacttctctcccactgggctttgttacttttaagcaagcctcaacatgtttcgaaaatacagatctttttcaatttctcacaaaaatatcacatagatcgtgttgaactcttgaaagtattctaacaaactgtggtttaaatgaaagaataaacatcagctatgtgtgatttgaaaatttacacctgccgggcagttgtggcacacgcctttaatctcagcacttgggaggcagaggcaggcggatttctgagttggaagccagcctggtctgcagagtgagttccaggacagccagggctacacagagaaaccctgtctcgaaaaaacaaaaacaaacaaacaaacaaacaaacaaataaaccccaaaagaaagaaagaaagaaagaaagaaagaaagaaagaaagaaggaaaatttgcacctgtgataaaattttcacaagaaggagaaaaatggtactagctatttatcttgatgtgtgtgtgtgtgtgtgtgtgtgtgtgtgtgtgtgtgtgtgcaggtactcctgacacagcacatatatagaggccaagggacaacccttggatgtcacctcttacctttcaccttgtttcaaaccgcctctggggattcactgctggccccacgaatctccatagattctcccctagaagccctggggttgcagacatctgctatccaactttctgtgggttctggggatctgaactcttaacctcactcttgcatgcgctttttacactgggttatctccccagcccatggccgtttcttgtttgttttttttttttcgtttgtttgtttgtttgtttttgggttgctttgttttgtttttctgaatggctttaagagattctcattgggcagcgggtgtcagcaccattcccctccacccccctccccccaacacacacacaatgtgactacagagaagaggacctctaggcagtttggaaagtttctcacaagttacaatctgtgtcacagagttgtgaaaaccgtggctgtgaaaatcctgaagaacgaggccaacgacccggctttgaaggacgagctgctggcagaggcgaacgtcatgcagcagctggacaacccctacattgtgcgcatgatcggaatctgcgaggcggagtcctggatgctggtgatggagatggcggagctggggccgctcaacaagtacctgcagcagaacaggtgacctggggcatgcgagttgtgtgcggtgccaccccgcacatgccctgtcccccgagtttgggctgtgccggggccccgcccccacacacgccctgtcccccgagtttgggctgtgccgggcctgatttctaggggaagctctctctccctctcctctctgtgtctctgagtctctgtctctctgtctctcttcgtgtctctctctctctctctctctctctctctgtgtgtgtgtgtgtgtgtgtgtgtgtacatctttgagggtgtgcacctgtgtggatgtgtttatgtggaagccagaggtcaatattggagatcaccctctctcctctctcagtctccaacttaattttttttttttatttatgtgaatgttggtgtgagtgtgtgccacacaacgcagatacttatggaggctagaggagctggtcagatccctcggagctgggcttacagcacttgtgagcctcccaacataagtgctgggaaccaaactccggtcctctgcaagaacagtacgtgtagccaggcagtggtgacacaggcctttaatcctagcacttaggaggcagaggcaggtggatttctgagtttgaggccagcctggtctacaaagtgagttccaggacagccaggactacacagagaaaccctgtctcgaaaaaaaaccaaaaaggagaaaaaaaaaagaaagaaaaaagaagaaaagaaaagaaaaaagaacagaaggcgttcttaaccactgaactatctcgttagctctccgccttatttcatgagacaaggaactatctcattagctctccgccttatttcgtgagacaaggaactatcttgttagctctctgccttatttcgtgagacaaggtctctcactaacaccggagctcaccaattcagccaaacagagccccagggattacaggttctcactggcatacctggcttttatatgagcactgtgggtcccaactcaggcttcatccctataagtcaaacagtttaccaactaaggcaccttcctagccctgtccagtgataaaatcctcaatgtgtgtggacagggcattgcccaccagcaggcagaacattcttctttggtaaacacctggaacaaacatgttcctggggcaccatctgtgtctcgtctggccgacctcttgagtgcctgcatctgaagaggcagcagcagttcgttgattctggtccagacataggtgctctaatgctgcggtcaacatagagtaactccccgattcctctgagccggggttccttctgtacagcttttcgtcatcatttccaacatggatgtgtgagtttgagcatgtgcagcaggtggaggccaaaggtcaagccaaacccatgcccatcccttagaataccatctgcttcctctgagacagaggtccctcatgggccagagctcatcagtttagctagactttctgggcagggaacaccaagaatccacccgtttcacttacccggctttgggattacaagtgcaggccgcccgccatgtttggcttttatttcacgagggcgccaggcatcaaactcaagtcctcttgcttgcaggatgagcgctttcctaaaaagctttctccatagcgctatgaatttttgtccatctcaaagcatgcctgaaaatgaagcacactcatcatatagtgtgtgtatgtgtatatgtgtatgcacatgtgtgtatgtgtatatgtgtatgcacatgtacatgggtatgcatgcccatgcatacgtgcagaggccaggagaggccactgtgtgtgtccttctcaatcactctctgctttattccctcgaaacacagccaggtgtggtagcacagacccttaatctcaacaccaaagaggccgaggttggtggctctctgtgagtttgaggccagtctgatcgacacagtttattccaggctagttggggctacagagggagaccttgtcaaaaacaaacaaacaaacaaacaaaaaaggttctcccacaaacagaaagtcctgcctgtttggtttggcgtggtttgatttggtgtggttttggttattctgatagccagcaagcctccgcctcttcctgtccccatcccctcccagtgctgagattacagcacaggtgaccacactcaactttctcccatcacttctggggatcgaaacttaggtcctcaggttgtgcacgcagcaactgtcctcgccctgagtcatcttcccagcctgtcctgttgtcgacaaagaaggaacgagtggaccgacccttcttccatgtactcgggggacacggctgtgtgtttggaatggccgccgtccactcttggtaatgatgtcgtgtgattctaggcacattaaggataagaacatcatagagctggttcaccaggtttccatggggatgaagtatttggaagagagcaactttgtgcacagagatctggctgcgcggaacgtgcttctggtcacacagcactatgccaagatcagcgatttcggtctttccaaagccctgcgtgctgatgaaaactactacaaggtaggagcgctcggtgcaagctcacagaacagggagaggaaacagctctgtgcaggctcacggagcaggctgagagctcagtacaggctcacagagcagctgaggggacagcttccatgcatagttaaggttgcaggttataaagatatagaaagataaatgtgtgctctctgtattttactatggtagaaatctcactagtaaccttggagaaaagtattcttaagatcgattctgtccatcaagaaacacaaaccaaaaatactgtaatgtttctcaactggaatctttttcagactaggatcttatgttgagttttttggtggtggtggtggttttttttttttttttttttcgttttacatttacttatcttgctctgtgtatggagtcatgtgtgccgtagtgttctaatagagagcagaggacaacttacagaagttgattctctccatctaccatgcatatcggaggaatcgaactctgatcttcggattcggcagcaggcaccttacccattgagccatcttgctggcctctaaatgcttgcgtcaacttgctttgaaacatacaaatcaaacaaattgatttttcttttcttaggcagggtttcatggagcccaggttggcatctgtctcctgagtgctggggttataagtattcaccaccacgattgggttactcagtctacctaatactatgaccctttaacacagttcctcgtgttgtggtgacccccaacctaaaatctttcatcgctacttcataactgtaatttcgcgactgatatgcagggtgtctgatatgtgacccccaaaagggtcactacataggctgagaactactgggggctttatgcgtgttaaaggaaaccactgctaactgagccacttccttggccccaaaactggtggatccttgagagatttttccgagtccttttcactgaattgacactgtgactttcagcagaggctttttcctaccccactccttaaacccagctcctttgtgcatcggggtgtgcacacctgacttaacgcatcacagagtgtccactctgcttccaggcccagacccacgggaagtggcccgtgaagtggtacgcccccgaatgcatcaactactacaagttctccagtaagagtgacgtctggagcttcggagtcctgatgtgggaagcgttctcctatgggcagaagccctacagagtgagccatgcttagctgtgtgttttgtgtctcagcctcttggacttaagaaaccatccctcagtatggggttattgccacaagaacctgaacccctggaatctgaggacaccctggggtctcccatcaccttctaacagtgggcggctagtgcaacctaacttacgcttgtactcacttgagaatgacatgtgatactgagtgaatgcattctcactgtgctacacacatacgtgcaccaggcacaggccatccttcctgagagttaagtggaaatggtgatacggatggatgacatcaagtattttagttgtaagcgtgtgtgttctcatgtgtgtgcacacctgtgtatgtgcaaacacattgtgtgtgtgtgtgtgtgtgtgtgtgtgtgtgtgtgtgtgtgtagcccagagaccatcctcaggtgtcattcctcagggactctccactttgctttttgagacagtgttttcattagcctaagctcacccaataggccaggctggctagcctgtgagccccagggatctgcctgtctctctacccagcactgggcacacaaacattcaataccacgnnnnnnnnnnnnnnnnnnnnnnnnnnnnnnnnnnnnnnnnnnnnnnnnnnnnnnnnnnnnnnnnnnnnnnnnnnnnnnnnnnnnnnnnnnnnnnnnnnnnnnnnnnnnnnnnnnnnnnnnnnnnnnnnnnnnnnnnnnnnnnnnnnnnnnnnnnnnnnnnnnnnnnnnnnnnnnnnnnnnnnnnnnnnnnnnnnnnnnnnnnnnnnnnnnnnnnnnnnnnnnnnnnnnnnnnnnnnnnnnnnnnnnnnnnnnnnnnnnnnnnnnnnnnnnnnnnnnnnnnnnnnnnnnnnnnnnnnnnnnnnnnnnnnnnnnnnnnnnnnnnnnnnnnnnnnnnnnnnnnnnnnnnnnnnnnnnnnnnnnnnnnnnnnnnnnnnnnnnnnnnnnnnnnnnnnnnnnnnnnnnnnnnnnnnnnnnnnnnnnnnnnnnnnnnnnnnnnnnnnnnnnnnnnnnnnnnnnnnnnnnnnnnnnnnnnnnnnnnnnnnnnnnnnnnnnnnnnnnnnnnnnnnnnnnnnnnnnnnnnnnnnnnnnnnnnnnnnnnnnnnnnnnnnnnnnnnnnnnnnnnnnnnnnnnnnnnnnnnnnnnnnnnnnnnnnnnnnnnnnnnnnnnnnnnnnnnnnnnnnnnnnnnnnnnnnnnnnnnnnnnnnnnnnnnnnnnnnnnnnnnnnnnnnnnnnnnnnnnnnnnnnnnnnnnnnnnnnnnnnnnnnnnnnnnnnnnnnnnnnnnnnnnnnnnnnnnnnnnnnnnnnnnnnnnnnnnnnnnnnnnnnnnnnnnnnnnnnnnnnnnnnnnnnnnnnnnnnnnnnnnnnnnnnnnnnnnnnnnnnnnnnnnnnnnnnnnnnnnnnnnnnnnnnnnnnnnnnnnnnnnnnnnnnnnnnnnnnnnnnnnnnnnnnnnnnnnnnnnnnnnnnnnnnnnnnnnnnnnnnnnnnnnnnnnnnnnnnnnnnnnnnnnnnnnnnnnnnnnnnnnnnnnnnnnnnnnnnnnnnnnnnnnnnnnnnnnnnnnnnnnnnnnnnnnnnnnnnnnnnnnnnnnnnnnnnnnnnnnnnnnnnnnnnnnnnnnnnnnnnnnnnnnnnnnnnnnnnnnnnnnnnnnnnnnnnnnnnnnnnnnnnnnnnnnnnnnnnnnnnnnnnnnnnnnnnnnnnnnnnnnnnnnnnnnnnnnnnnnnnnnnnnnnnnnnnnnnnnnnnnnnnnnnnnnnnnnnnnnnnnnnnnnnnnnnnnnnnnnnnnnnnnnnnnnnnnnnnnnnnnnnnnnnnnnnnnnnnnnnnnnnnnnnnnnnnnnnnnnnnnnnnnnnnnnnnnnnnnnnnnnnnnnnnnnnnnnnnnnnnnnnnnnnnnnnnnnnnnnnnnnnnnnnnnnnnnnnnnnnnnnnnnnnnnnnnnnnnnnnnnnnnnnnnnnnnnnnnnnnnnnnnnnnnnnnnnnnnnnnnnnnnnnnnnnnnnnnnnnnnnnnnnnnnnnnnnnnnnnnnnnnnnnnnnnnnnnnnnnnnnnnnnnnnnnnnnnnnnnnnnnnnnnnnnnnnnnnnnnnnnnnnnnnnnnnnnnnnnnnnnnnnnnnnnnnnnnccaatcatggtgtttcatggcaggcatactactatatgcattttgtaactgtggggatgtcataaagcatacgtaagcaaactagggcagctgcaaagtcgccagctgttacaatcttatgagactgtgatgtggattgggagaagtcacagaatcccagatgtcaactcaagcatctagaacactcttgccttccacaaactcagacatgtctgggagcatcactgcttccaagaatcctaacatcgaggctagatgctcctgctgaccacagacagctcagtaccagaagtctcccgatagtggtgcagagttgccacttgccacgttcaccactgctcagcccatagggtcggaagccccatccctattcttgggtacagtgtattttgccttcccctccatcccctgagcaggacagacaccgtgcacgtggtgagagcgtgaatccactgtgagccactgggcatgctctgccctacctatgggaaggatcccagccaccgtgataaagctgttcggtgctagtgaggcactcgatgttagaaagctgacattgaatgtagccatacattttttttgcaacgtatttttaataaaggttcaacctcccctctagcccgccactcagcagaggtagcagaagataaaagttattcggctatgggggaagtggacctgttcagcaatagttctttggggggcgagcttgatcctcttgggcagcagctcagccctgtagcaaacaccaaatgtgattcagcagctgcagaccagtccgctaggcaggcagacaccaggcatgaaccagcagctacagttaagtcttttcatcgcttgctttcatcgcttgcttgcctcagcatctaacctgtaggcgacagcacagacttgctgggcaaagacttaggatgcacagggttgggctctgaaccagaccacagccacagaaatctgtgagttctagcaagagcacaaaccaataccccctctccttgaaagtccagcttgaacgtgggtatggtatattacagctgtgtccatattctcctcttaagatttttagccaagggactaaggagatggctctgttggtaaagagttactgttgtgtaactctagggacctgacttcagtccctagtacccatataaaatacaccaggcctggtggcaagtgcttgtggtcccagcaccagcaaggaagatggagacaggaaaatctcagatgctttctggtcagccagccttgccaacttgacaagttctaggcaattgaaagaccctgtctccaaaaaaaaaaaaaaaaaaaaaaaccaaggtagatggtgtctgaggaaggacaccaaggttgtcctctggccttcagacacagaagatattctgtaccatagtgcaaaactcttctggctcacaaggacatggatccccaggatgctataaaatgcaggcttgagttctgtaagtttagagcaggaagagacatttctgaccatgctggaggcaggcgcagtgagcagcattcaccactgccaggaggcacggcgacttaatcatgtttccatgagcctatggataaacactaatacagctctctcttccttcttcagtgtggagaacaggccaggattcacagctgtggaactgaggcttcgcaattactactacgacgtggttaactaacagctccggcgcctgtccgtgcacaccacggattcccaagcgatcacaggaaattcattcagatgaactggctctcagagtttcatctccctctgcccggagtgagagctaagctaacataggactcaccctcacaacaggtctggtgcccagagacagacaagcagcaagaccttggggcctgtggagtcgtctctctggtctttgtttccatctgtgtggtcttcgctatcggtcacgtttgggagccatttccaaattctcttgacatcattccgttcctctgggtccaggatttcagtgtcccctgaagatcagaaaagaaaagtgctttgccactccagcaaaggacataaagagaaacctcgctggtgcagtcagcaagctggaaggtggttaaggacaatgacaagcctggacactggttttactctcagcgctgagacagagatactgtgtggatgacatgctgagatgtgctggcttggctgacacgcccctggagtccacctccctgcagtcgtgtgtgtttgctggaggaggtgtgaataacgttctgtgtggaggctgccgggggaggtgagctcccatgatcctctgcgactgagcagaagtgtgtcaggcaagggtcagactcccctctctgcagagggaatgcatccaggactccttgttgctgccactaaaaaattgccaaccagcaacttaagggaggaatggctcatttgagctcacagttggaggggataggccatcatggtggaaaagacaacaggcaggaaaggcttggtggcatgaaaaggaagctggaaggtcacatggcatccacattcaggaaacaaagaatgaacaggaagtggggccaggctataaggccctaaaggccacctccggtgacccagttccttcagatccatctatcaaagattccacaggcctctcagacactgaatgccaacagctggggaccaaatgttcaagcacacaaggtgcagtgccaggcaggggccttcctgaatgattacacagtgtggtatcctgacagagcgggtgagccatctcaggtctgtccccttatgagccccgtttaccatcccagattcccccttgggacccccctcatctggatcattcccctccccccaggccctatctccaaacacctaggtactaagtgaacctaggtactaagtcttcaacacatgaattctgaggggacacattcatactggagccgatggcagcctggtgaccaagaccatctcaggatgagtttctgaatggaatcttcattcgccataaaaccagagatgtgaccttccccacaaggaagccttgctaagtgcgacattgagctgaggacacacaagctgagaattccccctctgtcctcctagccttggctaactactgaccatacaccgaatgtcacccattcacggcacttttgctgaggacctaaaagctacaaaggctgcatagccttccatctaggtctagggacatgtacagatgggagcatctcaccttcacctctgagacactgggacattcacagccagggatggtacaggagtccctgctggtggtgggctcaatgaacagagacgatggtgaaatgggtgcctctctttagaccagtggttctcaaccttcctaatgctgagatctttcaatacaggtccttgcgttgtggcgactcccaaccatgaagttattttgttgctacattgtcactgtaattttgctactatgatgaatcgtagtgtagatatctgatatgcaggatatcggatatgtaaatatctggtatgcaggatatgtgaaatgagggcacatcccacaggttgggaaccactgcctttgatagggaggcactatgcttagagcatggttaggaagtatttagaagctattggtgtgtcttggaattgtgttagtaggtcaaccgtcctgtggagggaaggaagggggtggaggaaatccctgtatgttgaattcattgagcagacctgcagaacacagccttggtgaggaagtcccatgggtcagaccacctgtagatttagtcaggagaggaagggccactgtatagttatggagacaggactgtctgctctgagcaagaagttctctgctgagctcctagcctaccttcccttgtccccagggctatagaaaggccacctcgaagaccagggagcatgtgtgagaagtctgtggaggcctctgccttcttcctggcctctctagcagtgcctctccttcccagggatttgggactgaccgttatctggctatgactgagcagagtggagggatgggctttgccccccttcagaaagccgaaaccggttcccatgtgcagagtcacatgtggccatcgaccagggctctcatctggtgaaaactgtgtcttactgtcaagattaattctctcccctgggccactgaggagggcagatggcaagaggatcctccctagaggatttagactatgaatgcccactaaatttgcaaggtcagaaactagccaaggtccttctcaggcatctatccttaacttggtctctccacaagctgcctctgatgctccgagccccttctgcctggcagctgggctccctgtgtgcttttacctatgacccttggtcagcagagtacaaggagcacctaagctgcctcgccacctcccactgactgcaaacaccacatacctcatgcggaaccgaatgtctctccagtaaacaccccagccagccattcataaaaacctgtctctgtgtgcgctgggacatgtcctccctgtaccccgggcctgctttgtgtgccagacagtgactccacagggatgccaggtctgtgattgcattgctccttgcagagggaagccctcggttgtccttctctgggaatgctgccacccagagcagcacacagtgattccctgttatttcagaaattattttaaataaagatctactattagtcttgtgatgacctttacggatgcagacaggagatgatgggatatacacccttgactagagctggccagcatcttcgtaagtgcaacctgcttgtgaaatactgagccctcagtcataccactcgctacatttgggtgggaacgcagactccagagctcacctattctgccgcttcagaagcctgcaaggagagcccggtcctgtgaggggaaacaactgtgtctgagattcgtaggctgagaactgacagccgaactcaaacccagtagaaagtggtacaaggagaccccaaggtggccagagagggcggggtgagctttgccactgtcaatgaagacaacacgaaagcatcagagcagagaaggtgaggatgtaaaggtcccgagccctgggctcctctcattctatagggagttatgagcaggcacacatacatacactacatataattgcatgtgtgcatagacaagcatcttatgtatgtatacacaggaacacatacacatgcatgcacaaacgtgcattaaaaacatgcctgcaaatgcacactgcacacacagacatgaacctgtgtacacaaatccacaatcacatgtacatgttgacacatccccactcgcaatgccactttgcccacaggctaatctgatcttggaaatccctccatggagagtcccttcccaagtgactctaggctgtgtcaagttcatagtttaatctaagcatggtacagagagtgtatggtaaagagaacctgagtttagcccccagtgcctatgtagagaggcagtgcattggcacatgcccgcagcgccagctctggggagggagaagcagatcgctacagctcactggccatccagcctcacccagcacggttgtcacattccaggtcttatgatcctgtcttagaaaaataaaggagaaagcagctgaagagaacactcagtgtcaaccttctgcatgcacacatacaaacatgcacccctgaacacatgcacccctgaacacatgcatgcacacacatgcatacatacacatgcactggcacacatacaaacatgcacccctgaacacatgcacacatgaacacatgcatgcacacacatgcatgcacacacatgcatacatacacatgcactggcacacatacaaacatgtacccctgaacacatgcacacatgaacacatgcatgcacacacatgcatacatacacatgcattggcacacatacaaacatgtagccccgaacacatgcacacacacaaacatgcacacatacaaacatgcacacatgaacacatgcatgcacacatgtgcacacaaacatgcacatgtgaacacatgcacatgcatgcacacactcatgcacacacacacatacacatgagcacacacatgcacgcacgcatggcaaagaacgcaatgcctctgaacaacctcaatttaagagcattgcctgcacacgcatcaacacttgtctatccatacatgtggacttgtgtaagagccacagacttttaaagctggcaggctcccacactgtaccaattggtttcccggtgctgtgacaaatacctgagtaaagcaacttaaaaggaggaaaggcctgtcttggcagcagtctctgaggccttgttcctggagtgagggttcaagcccaggctcttgggcagcctaccaagccacatccagccaatgcaggatacagaggtgcaaagcagagactggaggtttagccaatgtaaccacatcagagatagggacaaagatggttgctgaccctcctaagcccatcttctggggtcctggcacgaagcttaggtttaaagagaggaccagcaacatgtccccatggaggcatgctcccatctggcaacacgtttcagctccagtctcccatgagcagcaccctgacacaacctctccccaggagaccagctcccctcctggctggcaccgggcttcagccttatccttctccaccagctccttggtttgcagctttgctgctctgatggtcaaagggagatgcgtggggctctcgctacagcaacgttattcctgccaggatggtaaagctgtgggtacctgacgctgctgatttgtgtctgtggtggcatagcttctcaccagaggagcacaccgtggaggaagctcctctcttactgtggtcaggaagcagagagagagggagagcggttcccaacatctacaacagcattcctgacgaacggcttccctttcacaaggccccagatctttgagtttattattttatttgtttgtgtgtatgtgcatgttcacacacatgtgcacccgcgcatgtgtgtgtgtgcttgtgtatgtgtgtgctatgtgtgcaagggttccttctgaggacagaagagannnnnnnnnnnnnnnnnnnnnnnnnnnnnnnnnnnnnnnnnnnnnnnnnnnnnnnnnnnnnnnnnnnnnnnnnnnnnnnnnnnnnnnnnnnnnnnnnnnnnnnnnnnnnnnnnnnnnnnnnnnnnnnnnnnnnnnnnnnnnnnnnnnnnnnnnnnnnnnnnnnnnnnnnnnnnnnnnnnnnnnnnnnnnnnnnnnnnnnnnnnnnnnnnnnnnnnnnnnnnnnnnnnnnnnnnnnnnnnnnnnnnnnnnnnnnnnnnnnnnnnnnnnnnnnnnnnnnnnnnnnnnnnnnnnnnnnnnnnnnnnnnnnnnnnnnnnnnnnnnnnnnnnnnnnnnnnnnnnnnnnnnnnnnnnnnnnnnnnnnnnnnnnnnnnnnnnnnnnnnnnnnnnnnnnnnnnnnnnnnnnnnnnnnnnnnnnnnnnnnnnnnnnnnnnnnnnnnnnnnnnnnnnnnnnnnnnnnnnnnnnnnnnnnnnnnnnnnnnnnnnnnnnnnnnnnnnnnnnnnnnnnnnnnnnnnnnnnnnnnnnnnnnnnnnnnnnnnnnnnnnnnnnnnnnnnnnnnnnnnnnnnnnnnnnnnnnnnnnnnnnnnnnnnnnnnnnnnnnnnnnnnnnnnnnnnnnnnnnnnnnnnnnnnnnnnnnnnnnnnnnnnnnnnnnnnnnnnnnnnnnnnnnnnnnnnnnnnnnnnnnnnnnnnnnnnnnnnnnnnnnnnnnnnnnnnnnnnnnnnnnnnnnnnnnnnnnnnnnnnnnnnnnnnnnnnnnnnnnnnnnnnnnnnnnnnnnnnnnnnnnnnnnnnnnnnnnnnnnnnnnnnnnnnnnnnnnnnnnnnnnnnnnnnnnnnnnnnnnnnnnnnnnnnnnnnnnnnnnnnnnnnnnnnnnnnnnnnnnnnnnnnnnnnnnnnnnnnnnnnnnnnnnnnnnnnnnnnnnnnnnnnnnnnnnnnnnnnnnnnnnnnnnnnnnnnnnnnnnnnnnnnnnnnnnnnnnnnnnnnnnnnnnnnnnnnnnnnnnnnnnnnnnnnnnnnnnnnnnnnnnnnnnnnnnnnnnnnnnnnnnnnnnnnnnnnnnnnnnnnnnnnnnnnnnnnnnnnnnnnnnnnnnnnnnnnnnnnnnnnnnnnnnnnnnnnnnnnnnnnnnnnnnnnnnnnnnnnnnnnnnnnnnnnnnnnnnnnnnnnnnnnnnnnnnnnnnnnnnnnnnnnnnnnnnnnnnnnn

SEQ ID NO: 230 - DNA, 5350 bp, Mus musculus
ggcacgagggaggagaaggcggcggcggagaaacaggaggagggaggaggagagggggttggaggacgcggccacctgcccaggtaggagccactccgcctcgccgcaccctagcaaagggcctcggcacccccaggcgacagaccttggctaaactaggctggaccgcagttttgctccagtgactgcggctgagcgcggacccgccgggctccggcgcgggaccagaactcccgcctgcaaacgcgcgcgcccgggcgcggagtggggcccagccggagctccgcctctcggcagctggaggatcggagaaccgggagacttccacggtgcgcgcccccgaagcaaaacaacgtccccaagcatttgagatccgggactgtcgtcgtgcgcgcctgtgagttgctgcagagtcccagcgcctctgaaatgcggtacttctccatacacttcccagaactctgaaggggtgcagacatggcgggaagtgctgtggacagcgccaaccacctgacctacttttttggcaacatcacccgggaagaggctgaagactacctggtccagggaggcatgaccgatgggctctacctgctacgccagagccgcaattacctgggtggttttgctttgtcggtggctcacaacaggaaggcacaccactacaccatcgagagggaacttaatggcacctacgccatctccgggggcagggcccatgccagcccagcagacctctgccattaccactcccaggaacctgatggccttatctgcctccttaagaagcccttcaaccggcccccgggagtacagcccaagaccggaccctttgaggacctgaaggagaacctcatcagggaatatgtgaaacagacctggaaccttcagggccaggctctggagcaagccatcatcagccagaagccccagctggagaagctgatcgccaccacggcccatgagaagatgccctggttccatggcaacatctccagagatgaatcagagcagacggtcctcatagggtcaaagaccaatggaaaattcctgatcagggccagagacaacagcggctcctatgctctgtgcctgctgcacgaagggaaagtattgcactaccgcattgacagggacaagaccgggaagctctccattcctgaggggaagaagtttgacaccctctggcagctagtggaacattactcttacaagccagatgggctactaagagtcctcacggtaccatgccaaaagattggtgcacagatgggccacccaggaagcccaaatgcccatcccgtgacttggtcaccgggtggaataatctcaaggatcaaatcctactccttcccaaagcctggccacaaaaagcctgccccaccccaagggagccgtccagagagcactgtgtccttcaacccctatgagccaacgggagggccctggggagacagaggccttcagagagaagccctgcccatggacacagaggtgtacgagagcccttatgctgaccctgaagagatccggcccaaagaggtctacctggacaggagcctgctgaccctggaggacaatgaactgggctccggtaacttcgggactgtgaaaaagggatactaccaaatgaaaaaagttgtgaaaaccgtggctgtgaaaatcctgaagaacgaggccaacgacccggctttgaaggacgagctgctggcagaggcgaacgtcatgcagcagctggacaacccctacattgtgcgcatgatcggaatctgcgaggcggagtcctggatgctggtgatggagatggcggacgtggggccgctcaacaagtacctgcagcagaacaggcacattaaggataagaacatcatagagctggttcaccaggtttccatggggatgaagtatttggaagagagcaactttgtgcacagagatctggctgcgcggaacgtgcttctggtcacacagcactatgccaagatcagcgatttcggtctttccaaagccctgcgtgctgatgaaaactactacaaggcccagacccacgggaagtggcccgtgaagtggtacgcccccgaatgcatcaactactacaagttctccagtaagagtgacgtctggagcttcggagtcctgatgtgggaagcgttctcctatgggcagaagccctacagagggatgaaagggagcgaagtgaccgccatgctggagaaaggagagcggatggggtgccctgcaggatgcccgagagagatgtacgacctgatgaacctgtgctggacttacgatgtggagaacaggccaggattcacagctgtggaactgaggcttcgcaattactactacgacgtggttaactaacagctccggcgcctgtccgtgcacaccacggattcccaagcgatcacaggaaattcattcagatgaactggctctcagagtttcatctccctctgcccggagtgagagctaagctaacataggactcaccctcacaacaggtctggtgcccagagacagacaagcagcaagaccttggggcctgtggagtcgtctctctggtctttgtttccatctgtgtggtcttcgctatcggtcacgtttgggagccatttccaaattctcttgacatcattccgttcctctgggtccaggatttcagtgtcccctgaagatcagaaaagaaaagtgctttgccactccagaaagacataaagagaaacctcgctggtgcagtcagcaagctggaaggtggttaaggacaatgacaagcctggacactggttttactctcagcgctgagacagagatactgtgtggatgacatgctgagatgtgctggcttggctgacacgcccctggagtccacctccctgcagtcgtgtgtgtttgctggaggaggtgtgaataacgttctgtgtggaggctgccgggggaggtgagctcccatgatcctctgcgactgagcagaagtgtgtcaggcaagggtcagactcccctctctgcagagggaatgcatccaggactccttgttgctgccactaaaaaattgccaaccagcaacttaagggaggaatggctcatttgagctcacagttggaggggataggccatcatggtggaaaagacaacaggcaggaaaggcttggtggcatgaaaaggaagctggaaggtcacatggcatccacattcaggaaacaaagaatgaacaggaagtggggccaggctataaggccctaaaggccacctccggtgacccagttccttcagatccatctatcaaagattccacaggcctctcagacactgaatgccaacagctggggaccaaatgttcaagcacacaaggtgcagtgccaggcaggggccttcctgaatgattacacagtgtggtatcctgacagagcgggtgagccatctcaggtctgtccccttatgagccccgtttaccatcccagattcccccttgggacccccctcatctggatcattcccctccccccaggccctatctccaaacacctaggtactaagtgaacctaggtactaagtcttcaacacatgaattctgaggggacacattcatactggagccgatggcagcctggtgaccaagaccatctcaggatgagtttctgaatggaatcttcattcgccataaaaccagagatgtgaccttccccacaaggaagccttgctaagtgcgacattgagctgaggacacacaagctgagaattccccctctgtcctcctagccttggctaactactgaccatacaccgaatgtcacccattcacggcacttttgctgaggacctaaaagctacaaaggctgcatagccttccatctaggtctagggacatgtacagatgggagcatctcaccttcacctctgagacactgggacattcacagccagggatggtacaggagtccctgctggtggtgggctcaatgaacagagacgatggtgaaatgggtgcctctctttagaccagtggttctcaaccttcctaatgctgagatctttcaatacaggtccttgcgttgtggcgactcccaaccatgaagttattttgttgcagattgtcactgaattttgctactatgatgaatcgtagtgtagatatatgatatgcaggatatcggatatgtaaatatctggtatgcaggatatgtgaaatgagggcacatcccacaggttgggaaccactgcctttgatagggaggcactatgcttagagcatggttaggaagtatttagaagctattggtgtgtcttggaattgtgttagtaggtcaaccgtcctgtggagggaaggaagggggtggaggaaatccctgtatgttgaattcattgagcagacctgcagaacacagccttggtgaggaagtcccatgggtcagaccacctgtagatttagtcaggagaggaagggccactgtatagttatggagacaggactgtctgctctgagcaagaagttctctgctgagctcctagcctaccttcccttgtccccagggctatagaaaggccacctcgaagaccagggagcatgtgtgagaagtctgtggaggcctctgccttcttcctggcctctctagcagtgcctctccttcccagggatttgggactgaccgttatctggctatgactgagcagagtggagggatgggctttgccccttcagaaagccgaaaccggttcccatgtgcagagtcacatgtggccatcgaccagggctctcatctggtgaaaactgtgtcttactgtcaagattaattctctcccctgggccactgaggagggcacatggcaagaggatcctccctagaggatttagactatgaatgcccactaaatttgcaaggtcagaaactagccaaggtccttctcaggcatctatccttaacttggtctctccacaagctgcctctgatgctccgagccccttctgcctggcgactgggctccctgtgtgcttttacctatgacccttggtcagcagagtacaaggagcacctaagctgcctcgccacctcccactgactgcaaacaccacatacctcatgcggaaccgaatgtctctccagtaaacaccccagccagccattcataaaaacctgtctctgtgtgcgctgggacatgtcctccctgtaccccgggcctgctttgtgtgccagacagtgactccacagggatgccaggtctgtgattgcattgctccttgcagagggaagccctcggttgtccttctctgggaatgctgccacccagagcagcacacagtgattgccctgttatttcagaaattattttaaataaagatctacctcgtgcc

SEQ ID NO: 231 - DNA, 1887 bp, Mus musculus
atggcgggaagtgctgtggacagcgccaaccacctgacctacttttttggcaacatcacccgggaagaggctgaagactacctggtccagggaggcatgaccgatgggctctacctgctacgccagagccgcaattacctgggtggttttgctttgtcggtggctcacaacaggaaggcacaccactacaccatcgagagggaacttaatggcacctacgccatctccgggggcagggcccatgccagcccagcagacctctgccattaccactcccaggaacctgatggccttatctgcctccttaagaagcccttcaaccggcccccgggagtacagcccaagaccggaccctttgaggacctgaaggagaacctcatcagggaatatgtgaaacagacctggaaccttcagggccaggctctggagcaagccatcatcagccagaagccccagctggagaagctgatcgccaccacggcccatgagaagatgccctggttccatggcaacatctccagagatgaatcagagcagacggtcctcatagggtcaaagaccaatggaaaattcctgatcagggccagagacaacagcggctcctatgctctgtgcctgctgcacgaagggaaagtattgcactaccgcattgacagggacaagaccgggaagctctccattcctgaggggaagaagtttgacaccctctggcagctagtggaacattactcttacaagccagatgggctactaagagtcctcacggtaccatgccaaaagattggtgcacagatgggccacccaggaagcccaaatgcccatcccgtgacttggtcaccgggtggaataatctcaaggatcaaatcctactccttcccaaagcctggccacaaaaagcctgccccaccccaagggagccgtccagagagcactgtgtccttcaacccctatgagccaacgggagggccctggggagacagaggccttcagagagaagccctgcccatggacacagaggtgtacgagagcccttatgctgaccctgaagagatccggcccaaagaggtctacctggacaggagcctgctgaccctggaggacaatgaactgggctccggtaacttcgggactgtgaaaaagggatactaccaaatgaaaaaagttgtgaaaaccgtggctgtgaaaatcctgaagaacgaggccaacgacccggctttgaaggacgagctgctggcagaggcgaacgtcatgcagcagctggacaacccctacattgtgcgcatgatcggaatctgcgaggcggagtcctggatgctggtgatggagatggcggacgtggggccgctcaacaagtacctgcagcagaacaggcacattaaggataagaacatcatagagctggttcaccaggtttccatggggatgaagtatttggaagagagcaactttgtgcacagagatctggctgcgcggaacgtgcttctggtcacacagcactatgccaagatcagcgatttcggtctttccaaagccctgcgtgctgatgaaaactactacaaggcccagacccacgggaagtggcccgtgaagtggtacgcccccgaatgcatcaactactacaagttctccagtaagagtgacgtctggagcttcggagtcctgatgtgggaagcgttctcctatgggcagaagccctacagagggatgaaagggagcgaagtgaccgccatgctggagaaaggagagcggatggggtgccctgcaggatgcccgagagagatgtacgacctgatgaacctgtgctggacttacgatgtggagaacaggccaggattcacagctgtggaactgaggcttcgcaattactactacgacgtggttaactaa

SEQ ID NO: 232 - DNA, 96595 bp, Homo sapiens
  misc_feature (49183)..(49621): "n" at positions 49183 to 49621 can be any base
ctctttagtacttgtaaatgcctgatgggttcttcctgcttactgcacaggcaaaaccaatttattgagaccacaccatcacaataaaagagtttaattgacacaaggccggccacaccacatgagagatgaagttactactcaaatcaatctcggaaaatttggaggctaggatttttcaaagatagtatggcaggctaaggagtctgtttctgggtgggagcacatgactggtccgtagggttggtggggtcagggaggtcagtggggtcagcagggccagcagggtcagcagggttggtggatccaggtgaagccattggttgtcagaaattcaaaaacctaaaaggtatctcaaaaagcgaatcttagtttctgcaatggtgatgttatctgcaggagtaattgggaaacttgcaaaacttgtgacctctaaataatagctggtaatcatttatgtctacaccttagcagaattcaggctcctcacaccctcctaacctggtggcctttcacaagctttacaaaggtggtttaatttggggaaaggactattgtcatttaaactataaactaaatgtctccccaggataacttagctcagacccaagaatggttaagggcagtttggaggctaatggcaagatgaaatttggttagatcagatactttccactgtcataattttcccactgttataatttttgaaaaggtggttttaagttagaatggcaatcattaaaaagtcaggaaacaacaggtgtggagaggatgtggagaaataggaacacttttacactgttggtggaactgtaaactagttcaaccattgtggaagtcagtgtggcgattcctcagggatctagaactagaaataccatttgacccagccatcccattactgggtatatacccaaaggactataaatcatgctgctataaagacacatgtacacgtatgtttattgcggcactattcacaatagcaaatacttggaaccaacccaaatgtccaacaatgatagactggattaagaaaatgtggcacatatacaccatggaatactatgcaaccataaaaaatgatgagttcatgtcctttgtagggacatggatgaaattggaaatcatcattctcagtaaactatcgcaagaacaaaaaaccaaacaccgcatattctcactcataggtgggaattgagcaatgagaacacatggacacaggaaggggaacatcacactctggggactgttgtggggtgcggggagcggggagggatagctttaggagatatacctaatgctaaatgacgagttaatgggtgcagcacaccagcatggcacatgtatacatatgtaactaacctgcacattgtgcacatgtaccctaaaacttaaagtataataaaataaaataaaataaaataaaataaaataaaataaaataaaataaaataaagaaaaggtagttttataaagataaatatacagatcaatgaaatagaattggaagtctggaaataaacctttacattgattttcaaaaagtgtgtcaactcaattaggacagaataattgttttaacaactactgttgaactggtacaactggaaatctgcatgcaaaaaaaatgaaattggatctttgcctcatattgtacatgaaaattaactcaaaatggatgttgggcataaatgtaagagttaaaactataaaattcctagaggaaatcataggagtaaatcttcatgaccttagatagtagtttcttagctacatcaccaaaagcataaacaacaaaagaaaaaagtcgataaattgaacttcatcaaaattaaaaacttttattctgcaaatgataccatcacaaaagtgaaaagacaactctcagaacaggagaaaatattgggaaattctatatctaataagagacttgtattcaaaatatgtaaagaactcttacaacttaatgatacaaagataagtgactcaattgaaaactgggcaaatgatctgaatagacacttctccaaaaatatgcaaatgacaaagaagcacatgaaaagattctcagcattgttagtcataaatgaaatgaaaatgaagtcatcagataccacttcacgcccactaggatggctataatcaaaacgacagacaataacaagagttgacaaagatgtggaaaaattggaaccctcctgttttgctggtggaaacctgaaaatggtgaagccacttttgaaaacagttatcagttcctcaaaatgacaaacatagatttactatatcactcagcaattccactcctagttatatattcaagaaaaaaggaaaatatacacccacacaaaaacttgtataggaatggttgatgcaaaattatttatagtagccaaagagcagaaaccgatgagtggataaataaaatgtggcctatccatacaatggaatattatttggtactaaaaatgtaaaacactgatgtatgctataacatgaatgaaaacattatgctaagtaaataagccagtcacaaagagcacatattacatcatgcaatttatatgaaatgtccagaataggcatgtctacagagacaaaaagtagatgggaggttttcctagggccttggatggggaggagggaaaggattgtgtgggatgggaagcatgagaagtgatatgggtatggggttttgttttgtggtttaaaaaagttcttccaggtgcagtggctcacatctgtaatcctagcacttaaggatgcagtggcaggagtatagtgtgagcccaggagtttgagacctgcctgggcaatataaagagaccccattcttcacaaaaaagaaaaaaagtgcttaaaaaagttctaatattgatagtgatgatggttgtacaactttgtgaatacacttaaaacaatttaattgtatactttcaacaagtaaactggatgttatgtgaattatatcttttgaaaacttaaaaatggaaccgcactttgaaaaatataaaaaagaaaaagaatgaaaagatcttggtatgagaaaaaccatctaattttcactacagtgaaaaataacagctgaactaccttctaattatataattatattttaaaagagtactctgttaagcaaatgattagctacccattgaaatagatgaaagggaggagttatttttgagcataagttttttccatccttttgaatctccagtggcttgggtcatgtctggcaagtaaaggaccctaattcaattattgaattgtttgctccctggaatttcacaaaaaaataaggaatcaggtacacagaggaaacttgacttgctcagagctgcacacctacaaaaagtagcagagctgagactactatggcccgtgcttcctgacccgtggccagtgcacctaccgctgggtttaaacacatgtgatcacacttcagacactatctttggtctttaagtaacttttctgttttgtttgttcaaaagattactaacaaaagaaaaatgaggaagtttaccatttgtaggtgaaaagtcacttttatatctggttgaattggttagggaataccagcagaaggaagttgttcctctggctacatcctgtgtcatttcagcaactggatgaatgtgatcagaaggtgaaaatcactgagagaagccactcacctccatcatgctggtctatcaaaattaacttcccttcataggacacaatagggttgttactttttttttaaaggtatacctacatatgaaaataattaattttatctaaatttaatgtaatatgcataaaaatacacctgatgctgtcctaactatgcaatattctcctttgtgtgtcaataaaagtgtattatttcaatacatggagttggttattattttacttgcaacctaaagcaccttaacagatatatcatgtgtaacttgtgtatttttttaatttagaagagacaaaaatgaggaccttacattctaaatattaaaatgtgcaatcacatgagtccaggagtttgagaccagcctggcaacgtagtaaaaccccatctctactaaaaatacaaaaagtcccagctactcaggaggctgaggtgggggaatcacttgagctggggaagccaaggctgcagtgagctgtgattgcgccactgcactccagtctgagtgacagagtaagaccctgtcacaaaaaaaaaaaagtacagcgtatattctatagtaaaaaacatgtgggccattacattctgaaagaacatagtgaaacatttacagaatatcaaggcctcaccatctagaagaaaagaatccttactttcctcatctttctacctcaagaaaaaagggaagcgggaagaaacaaaagtgctaaagttacaagtggtaaccaaacaagaaaaggagaaccgcttaacaaaatgcactttgaaaagcgctggctcatataaaaaccagaagtttgagagtatcacaatgaggccacactccaacctcccagaaaccatatattgtgcgtctacaaaatcctgaacaattctcactcagatcttgagagaagaaggggccattgtttatccttagtttttctcatttttgactgtggagtagtgaaaatggctgcagtggagattagtgcaaaaggaaatagcagcaatgtggcatgattttgtcagagtgtgaggactccaacgacccacattaattgggggaatgagctgaaactcacagatgcccccaacctcgctggacagagtaagctcagccttctccctccctcaatgaagtgcgaagcctgcatgttcctcacagtctcacattggaaggaggggcccagtttgtgcaacacaactccagctaagcccacccccaccattcccacgctcaaaggttatagaaaatcaagctcaaaaggaatattaagccgtcatatgtaatccagaaaaggggtaagaaaaggctctgacatgaggatttaggagctgccacacacaaaggggcagagcaaagtgaaagtctgaagaaagctgccaagtatggacaagatgaaatcaatgaactagcagctatgcaaaccttaaaagaaaataacatgcacaaattaaaaataaaatccagtctgaaagaatttttaagtgcacaggctacaaaatttgataagagcctgcattcaattttttaaaaaactcaagaaccgattgaataaccaagagaaaataactaaaaagagtgagatagagagaaccagagacaaagaaataatttgaggaccaataaacctacctacaggtaaattagaaataacaagaaataaagcagacccagctaaacatttagttcccgaaaaaaaagaaagggagagagagaaaatcactgtgaaccaggaagaaaaaacaaagtagattactacaatcagagaaaagataatagacttagatgataaaaagttaattaatatccttgaagaaaagcacttaacaaataaaaaggtatttaaaatcacacaagaaaaaattctttgaatgaagatctaaatctgcgcattacaatggtggatacacagcattatatatttgttaaacaccatacaatatacaacaccaagagggaacctcaatgcaaactttgggctttgggtgattatgatgtgcattaaagagtgcattgtgtttaagaaataaaagatggccgggtgtggtgactcctgccatcactttgggaggccaaggcaggatgatcacctgaggtcaggagttcgagaccagcctggccaacatggtgaaactctgtctctactaaaaatacaaaaaattagctgggcttggtggcgggcgcctgtaatcccagctgctcaggaggctgaggcaggagaattgcttgaacctgggaggcagaggttgcagtgagccaagatcacgccattgcacaccagcctgggcaacaagagtgaaactccatctcaaaaaaagaaaaagaaataaaagatgctggttgatctgtatcagtatatatccttgtcaagtttcttaatatctcagttaaagaaagtttcctccagcagcctggaaagaagagcaagtcacctaaaagaggacaaaggactggctgttctcacatttctccaaaacaacattcaatgccaaaggggcaagggaggaaaatcaaccgagtctaggccaaagggaagtaggatggagacacaatgtgcccaccttgatgtcactgcaatacaacagcaacagaataacatcctgaaagtggagagcattgatagatgcagtatgtgggatcacatcttcacagagtccatccagctcatcaacaaagaaagtaggaatgagatatggtggtagaaaggtctggaggtgcataaggtatccttttaaatggagaactaagaagagaccactgagggtttatggttacagaaatcaaaaattttaaacttaactatgtaaaactcatataactagggaaacgtgagaggtgagctgaagtgaagtggagtgagagaggtaattggttcatgtatcatagcagagttactgatactgtctgaaattaaagctcatggtttagaagaaatgacgaaaactgcttattattgtcacttttcttttcctttaatcaaagtggggtcatttcagaaatgatacatttgtggcaaagaatcatttctataaaatcagcaattctttagatcccatttcagaattttttattctgttaaatttaagtagaattaaatatcatatttaacatggataaaatgtataataaatgtattatatttaaaatgatgcccatttttatatctattgccatgtgtacatatagaaagagataattttgtaagggtcacctaacggtaatgatgattatgtctgaaatttgggatgtttctatttcctttgtgcttttattcttttaagggattgcctattaggaatacttgccactgttaccaaaaaaactatttttttaaattaaacactattttttagagcagttttaggttcacagtaaaaatgagaggcaggtaccgaggtttcccatatacccactgacctcacacatgcacagcctttcccattatcaacagccccatcagactggtacatttgttacaattgatgaacctactttgacacatcataatcacccaaagcctgaagtttacactgatgttccctcttggtgttgtatattgtatggtgtttaacaaatgtatagtgctgtgtatccaccattgtaatatcatacagcatactttcacagccctaaaaaatctctgttctccttctattcatcctgccctccccaccagcccatggcagccactgatctttttactatccagatagtttggctctttccagaatatcacctgttgaaattatacagtatgtagccttttcagagggcttctttcacttggtaatatgcatttagatttcatccatttcttttcataacttgctagtgcatttcattttagtgtggaacaatattccattacactgatgtacaagagtttatatatccattcacttactgaatgacatcttgtttgtgtccaagttttggcaataaacttagtaaataaagccagcgtaaacatttgtgtgcagatttttgtgtgaacataaggtttgaactcctttgggtaaataccaagaagcacaattactgggtactactttaggtaaataccaactactttgggtaaataccaagaaggacaatcctcttataattactcatgttgtaagaggatgtttagtttcataagaaactgccaaactgtcttccacagtggctgtaccatcttgcattcacaacagcaatgaatgagtatttctattgcttcacatcctcactagtgttcactgcggtcagtgttccgaatttgggccatactgatatcttactgtcttcatttgcatttccctgatgatacataatgtgaaccatcttttaggctaggcatggtggctcacgcctgtaatcccagcattttgggaggccaaggcaggcagatcacgaggtcaggagatcgagaccatcctggcgaacacggtgaaaccccgtctctactaaaaatacaaaaaattagccgggcatggtggcgggcgcctatagtcccagctactcgggaggctgaggcaggagaatggcgtgagcccaggaggcagagcttgcggtgagctgagatgatcgggccactgtactccagcctgggcaacagagtgaggctccgtctcaaaaaaaaaaaaaattactacatgatactaagtaatgcggaaggtgactcaaagggggaaaggaacacagcagtgtaaaggaaggaggttgtagatggatctagaatttccccctcatttccatcaggtgaaagcctgagaaaactgcaatctttgtgcaggctgggtttgctttgtacacactggtcccctagtgttcatctccaataatgctgacaactctgaaaaccatctgtagacattctgcaggctccatctcaggaacaatggctattttttcgggtagttgaagcaaaattaagtccaatgataagcaaatataaccattatcaaaatcttccatttatgtttgttaaagcaacctaagtatgatctgagaaggactctgtattctatatttgagtccttgtggatgaactgtaacctagcttaataggcagacaagattgaaaacctaatttaggagtatgtgcctttaacaatagctgagtcttggccaatcccagtggccatacttcaaccattcatacactgctgagtgttcaaactgtgttcaaagaaggcaaaagccaacctgtaaccaatccagttgtttctctgccttacctccaatttctgtatgtcacttccctttttttgtctataaatatgttctgaccatgaggcatccctggagtctctgaatccgctgtgattctggaagctgccccattcgcaaatcattcattactcaattaaactgctttaaatttaattctgctgaagttttcttttaacaggtttagaaaaaataatggcaaaaatgaatgaaaatccaataaccctggaagcagaaaaggctgggggctccaataagtgtaaatagtcccatccctatattttctccatggcaattacaatccagcacattatatatatatttttttgcttctcgcattttggcttagggtaaagctttttaaaacaggcactgccaaccagtgttatcaagaaggtctggatgccgttttgtgggaacattttaaagaggaatgtccaaaaggaaaagggggatgggttgggagaagggtatcaggcgggtatctcaaaaccattcttagggctataggtttaatttatttggttgtggacgtcagagccgtcatggtaagaaggaagcaaagccttttgtaataattaaagccttcagaagcagcgtgccccattgcccactagtgcgccgtgaagtctggtgttcacctacagggtccctctcagcactgcccaggcctcccgagtgctccagcacagtagcttggagcttgttggtttggtgaccaagatacactccagggaatatgccatgcagtggagtctcttccccggcactgcatagcaaaaggaaagggccgctgggtgtctgtgggtcctgggcagtcacagaagccaccgcgctggcggggaggagggggaccgatgcggtccatgtcccgggcagccccaccttctctgcctgcgaagggcccttgtccggcgggaggagagaggcgcgccccacccgggctcctctacacctgccgccgcctgggccgattccgcgggcctcgcccggcgcttcagccgattcccgcccagctccgggctcatgggcgcggtcagcagggcgggccagggcggcggggcgcgacactgggaggaagtgcgggccgcctgcccgggcgcgttaaggaagttgcccaaaatgaggaagagccgcgggcccggcggctgaggccaccccggcggcggctggagagcgaggaggagcgggtggccccgcgctgcgcccgccctcgcctcacctggcgcaggtaggtgtggccgcgtcccctacccggccgggactttctggtaaggagaggaggttacggggaacgacgcgctgctttcatgccctttcttgttctaccttcatcggccgaggtaaaagtgctgaaaccatgtgaataaaatacaggtgggttccgccagcttcgctcctgaacctacccgcgctcgggatccagaagctgcgccgggagagaggggctcaggcctgggcggaggggacggaggtcagaccgtgcggaaagtgacccgggcaccccagggcgcccaggcccccagggagcgcggaaagtgcggtcgcggcccggccctcgggagacgcgggattgggatcaggcacagcgcgaggaagtcgatcttggagctagaacattttcctttggccatttacacgaatccactggaaaatgccgcagtgtttatcaaagttactcaaagtagaaatgtccagacgtcttatgagcttagacaaatcttttactacaaaaagaaacagcagttgcattcaaacaacaacccttctgaaccactactaaaatttagcataattactcttgtggatacattttcattgtcaagtaatttacttagccaatgaacttggagagcaagaaagttttatgtagtaaaatgtaaatttgagttaagagttaagggtgtttctttttgtctgtttgtctgtttttggcaatgtggctccaaaaccttaagcccacctaaaaactatataaatgcaatccattcttttgttggaatgttcaaggactagaaagacaattggagaagtgagagtttgaatctttttttacgttggaaacagtgttgcaaaatattttttgagttttgcctgacttagcaaagattcagtcgaactcaagtagagttcaaagcattgcagcgtgtagtaaaaaaaaaaaaaaaaaaaaaaaaaagagttgaagatgttgtgccatatctgattcttggtattaaaaataaaaaaaggaaccatttaatccctaagagttcctggaagaaatggaattgattctaccatctgacttctttgtcttagtagggacaaattcattgccttcacacaggcagcattttaattaaatgcaactaaatacattgatgtcctccttctccccagtgaaagtccgagcagtgcatagatagaattatattttctcaaaaaggcttaaatacatgtaaattattaagtgttttaagtgagaaatctttgtcagttgaaattattttatcaaatcatttttgttctgaacggcacttttgttttaacgtatttagaaaactcttgcattaaaacagaaattgatttgtattatcccctgtatttgaagtgcactttaaagtgtatttgaatgagagattataatcaaattacttgatttgtgtcttatcctcttactcttctaccttggatttgaaaaggttggatttgaacactaggaaaaaagagatttttctactgagggattgtgggaagatttttttttaagcctctgtatttgaagtgaaatataaaataggattttataatagtcttaataactagaaagttttaagctaggataaaaatggggtgtatactttaggtctttatctttcctgagagatgaaattggtagaaacgttattttattgctagatttcactttagaaatgaatcaccctgatctttgttaggcccctatttaatattctaaatgcaggtctaatctctctgcttttttttaatggaagacttcttagtagaacttcacttatttagcacattgtttgcccatggttataatccaatatgcttgtgccaagacgtattttggaattcaagctttttcagaatttggaattaaaatttagaatctaaatttcagaactgagaaagacattgctcagaatttagaaaggtaaacatacatgttgaccctgctggttacatgccattccaatatagtctggagagaatcctgtaattccatgcattaatatttctgtacttttacatttaagaacatgaatattctcactaagtggaataaataaagactataaagagctgtgtgtctgtttagagcaggtgttatcactacgagagcttctctaagacttaccaaaaaaaaaaaaagtgttgtttttcagagctttttagagctgcagctgagggactgagtctgtattagactccactgaactacggtttgcttttaaaaggaaagtgcatttatgttgttcaatacttcacactttccagtaattagaagggcagttcctctctctttagggagtcttaaatagcaagattttactgaattttcaatcataccgatcaaaatagaggtacttcaagtaagagtggatgtctcatctttgtaatataatttcaaacagcatagtttctgacagtctaccattttagagaaacagagcagaagttacttacaggaggggttactgtcaccctttacagctgcagtctgtccatggaagaaatattatttcctgttaactttgcaaccagctgggtttgtgtcagttatctaagcctaagtgatggctaatttttactttctcaactttccctgtatagatttttttccagctaccccctgacttttctactcttgctttgctggttttaacattttccactacttctggattggtttagctataactgggtggagaaaacaacaacaacaacaggaatttaggcctttggggaagaatttgttttgttttagaagtctacacattgagcattactttttcttctaaagcaactaaaatcagaaggcagagtcctaatgagagattatgatcaaattgcctcatttgtgtcttatcaccttcctcttctacttagatttgaacaggttggatttgaatactaggaaaaaagggttttctactgagggattgtgggaagatgttttaagaactagtctgattggattttaggaaagttcattcattttgatatgatgttatcagggacattttctatttgcttataattttatctgaccaatattagcttgtatcaatttgaggtttttttttcctttatgaatcaattgtgcaaggtttgccctacatctcttaaaaggtggttaaactggaatcttaaagacagttgaatttagccaagaccaaagatatgcaaagaaagaatattttgtttatgttacagtacatttaataaatccaaatggctcccttgattcttttctttctgggacaccacgtattgatttctggcagctggccaaaggcagatggtggtggagcaagcgaggacagttaagaatgttgatgattactggattactgaggagtactgtgagctttctggtcctctgctcagaggtgtctagctctgaaactgggatcctggctctgagctggagaggcgcttccagttactgctgtcctggagcgctggaagggagcataagtgtgaggagacagtgggcttttagcctgggatgcagatgagagatgtcttgacctgagtgaaaaccttgcaggcaagctgcaggtctaccgagcagggtgagggaggctctcgacctggatactgtgaactagggagagaaagtaaattcaacagaaggagggcccagggcagagatttaggaatatccacagtttaaatattgctttacttaagtatactctgcctgactataagtagcatttgaatgttcaacatatgacctttcatttctcccctccattggtttgtcttaactgataaatctttattttcccatggtcaacctggtagtttattaatattacatctatcagttcctgttgagttgacatgaaaatgttttggtgtgacctaagttaatttctctttttgtttaattttaatttgtaatgagttcctcttttcattctgcccatcctttggtactgctttgagttatgtcctctagaattctcactatttccttatgattggcatattttcaaagttttttggtgtactaattttaaacagtgtttgttgacactgagaattcaggactttggagttttagaccaccatcaccttctactccttctcacaccatcccaggataattattctctcatttgagattaagaagttatttggtttattttattatggttatataaatatagtttactgctaaagcaaggtatatcattccattttctatctcgtacccctttttgctcttcctggggtaaacccttgctttgtttttgtgttttcttagtttgcactgtgcctattatcatttccttcccaactttctgacataaagatgaaagccctattgacacaattttctacagtgtcagatataccaagtaatctcacggttccatttttctttctttttttctagaaccctccatcttcttcttgtctaacagttgctcttcagtcttgctatacatacagtaatacctgaagaatgtttggaggatatttggtgtgggatttttcttttttttttttctttttcttttttgtagagatgggctctcgctatattgcccaggctagtctcaaactcctgggcccaagcaatcctcttgcctcagcctcccaaagtgctgggattataggcatgatccactgtgcccagccctatggggaatatttgttgactaaatatgttttatgtaaattgcttatcatactctttgttgtaacatctgtggcattaatatgcctcttgttaacactcacctacattttacctgttgtaaatccactgtcataattattgaaaatatttctccagagctttttaattctatggttatttatttattgtagtatagaacttttatgatttcttccatcagggtgcattctgaatcatgcttagtgagagatggtttttaactccactttaacagttagcatctatgttttacatcagtgtcaatgtcacttttgtattatatacgacaccaacattttattatctgagtgatgagaatgtttatttttgtggaaatggagatctcatgagactttaagcagattgctggccttctcctcgatttccttgattgattcctgaagtggaactgcagtgctaagtggaattccctgggaagcttgctcaagtaagtaagcatgagaaatgctgaatgaaataaagtgcagcaagcagggataaatatcatgggcatcttcagagcctttgtgcaggtaacatgcacagagattctctgagagagtcagtctcagccagtggtcctacacttccatgaccctgcagtgcgtttgttcttagagtggctttcagggctggctctgccacagcctctttgggaaaccatgcatgacctcttgctgctccttaccaagctccttaggctttgcttggtagaggcagaatgttgtggttgttttcatcttaaatgctaacaatatatgaattatgtggtggatacactgcctcaaagtgacatttatcgaatatttttgtagctacgggttgagagtaagggtctgaggccccactgggttcaagtcccccttctttatttgtaagctcttcttttgtaaatggagcagtcacagggggcttcactctgatacctaatggagaccgtgcctgcagtgctcggtacctggtatgtggttaaaactgacataactgtcagagcctctcccaggcgggctgactctgggaatctgccctgcagtcttggagggaaggcacgtccagataggtttgatgagcaactacaattgccaaagttagtttctctgacctccaagatgggagaactttctaatattttcttttaggaaagttgtccattgcataactgatacacgagtacatatcctttagtacaggattcagatacagcgagcaacagaaaagcccttcttaacctccaccctcagtcccagccctgcccccagtcccactgttggggagcagttggagctctaacctctcttctttcgtcctgtgcattcatgtgtgcatgtgtgcacgtcttcagaagatataatggtgggctgtgtatgtcttcttaatacctttatcactctggaactttctttttattaatatgttggggtgcggggaggtctccatattcagtgattattgtaatttttatgacagtccagaataggcatgtcgattttttttaatttttgatattataaacagtgctgcaatgaatgcactttttcttttcattctttccctctcctttgccatttgcactgtgttttcatgaaaccatcaggttaatctttatctcaaggaagcccttcatccctgtccatcctgttcttcagtccatccacttagttttcctatgattattttagcaagcaggtggttaatttccaaggaatgtagttacttctttgggatttttttaagtgatgtattagttttctgtgtattttattacttgtttgagtgcaccattacccccgtctcccggggtatcagttcatctgcttgcatgcttggtgcctctctctcctgctgtcagctttcctgatgtgctgggtatttccacgtgtgtgttggtttttttttttttttaggtaccctaggcattagtcttttaaggctgcattcttgcagcctgtcccacatgagataggaggagggcaagacctggatgtgcacagggcaggatgggcccataactggtctgtgtggtgtgtgggtggcaggaactccctgttctttgtgggtatggccatgccttccctattcaaacgaagccacacacctgtcttttcctgcgaggcgtcttctgctgctttcttggagctggggagcatctactcttcccttgtcctcccgctcctccctgttcctccctcaggtctctgtcgcttctaaggcactccacccttggtcttctcccaccttgcaccccccacactgctgcctgcctgcacagggggactgtgattgcccccttcagtgtgagcctgacctgcttcatgcctttcaaggagagcattcattgccaagctactcatggaacatctcctcagatcctcagcgtgctatgacttcattttctgtaatactgtttttcatgtttcttccccttctctgcatttatagctgtgcatatgcttgaggtggaaggccaccacttccttttggttaacaacaccaatcagctgatggtcatggctacgtgaaggaactcacagtgagggctcaggaagagcctggctagagcaggctgcatcgcaggccttggcgttaggttccccaaatcactgctggtgatcttgtagctctgtcatgaagtctgtcctgcttattaggataccgagggtccaaattcatagattcttagaagcctgtttaaatatgcagagtatctaattcaacccgattagaaacgggctcagaaaggtgaagggatttgtccaaccactgagtgatgctgctgggattagaactctcaaaactaggtgtttctaatccagaaccagaatccctatccactactctaataaggcgtaaaagaggatctgctgtcctgcctaattggtgggcaggtttggagtcctgtcagcagctcaggaaagcctggagaggcagagggaggacacaggctcagtgtcagacatgccaattttactcatcaccaatggttacacaaaacttgttttgatctttgtggcttttgcattgagaagttaagcatatacaataggaattagacacaatcccaaaccaatgagagactcaagtgagaagagctgaagcttttatgcatgccttccttccatagagataaatttactatccagagtgaactagagcctcgtggaaagtgagtgccgagcccctagctgtgagtgtctctgtccttcccacatcagacctccatgtctgtggctgtccccctacggggcagaactgctgctctctgcttgtgttgctgtcgtgagggttgggagtggacaggtgtggacagatctcagacccgtttccctcctgttatggaaatgtttgtgaggcaggtgggacttcaatgatttggtcaaggaaaggcagcttggcagctggggagaagggctcaggctagaaaggcaagcgtttgtgagggatgatttccccaaagaagccagcagtgtgtaaggtattccccggagcttgtttcttctcagaagactctggaagctgtgtcagtgtctgttatggaggaatggagtatcagtccgatcaggctttcataacaaagcaccacatactgaacggcttgaacagcccaatgtgtcgcctcccaactctgagccaaagagactgaggtcaggatgtcccagggtggctccttccaagggttgggtgggacaatgtgcccccagcatctccttggcttgtgggtgaccatctccagctccacatggcatgctccctgtgtgcctgtctctgggtccagatctccttttcatgtaaggacaccagtcatgttggagtagggctcaccctaaggacttcaatggggcgtaatcactgctgtaaagaccctgtctttaaataaggtcacactcagaggggttagggagttaggacatcaacatttgaacttgggggacacaattcaacctgtaacaaatgtgtgagtgaagactggcacctccccacgatggcctttctgtgatgccatcaagagcaccagggagctctccagatatggagatggacagatgtctaaggcccctgaaatgagcctgctgtacagatgattccagaactctgtcagtgtgaagaccaaacacaattaagcacattaaaatacttacggtaaagtgtttctttcactttagatgtgcaaaaacttaaagagagagagacttatgagaagactcagggaagaaatgtaagataaaggtgttaagggagacaaactccacaaaattgtaaagtgaagctgctgtggggagtagagcccagacccagataatatgcaggcatgggtccaagggaggctttgcacaccaggcgggggaggtgcagggccatggatgaatggtcttgggaaaacggcaaatcgtttggaaaaaaaaacaaaactttgctctttatatcaaaataaattccaagctgaacaaagaataaaaatatagcattgaaataatgaagctattaaaagaaaacttaggtgagttttaaaataattgtgaagaggcctgtctaaatgtgataaaacatatgaatttatattcacactcatcacaagattgataagcatgatttcctaaaattttaagcaaatccccataaaatgaaaaaatatacaaataagtgaaaaaaatggtaagatatatttaatttcaatacttgtggtaaaacatcaatagctttaatatgcagcgagttttttcaaatcaataagaaaaaagacacagatgggtgctgacagggccgtttggtaatatcttttaaaatttaaaacacaagtgctttcactcaacaacttcacttttaggaacctatcacacatataaattgacaaaagtggagaaatattcattgcaacattttattttataatagcaaaaaaaaatcactaagggaagtacagttgattcatatgttggaatcctatgcagtcttctaaaaaatgtggaatttatttcatacaccaaatataacaatgtccaagttctactagtgaaaaagcaagatgtaacatatcattgtatttgtttaaaaaactcatgctgggttgggtgcaatgactcatgcctgtaattccagcactttgggaagccaaggtgggtggattgcttgagctcaggagtttgaagccagcctgggcaatatggcaaaaccccacctctatgacaaataccaaaaaaaaaaaaaactagcctggactggtggtgtgcacctgtagtcccagctacatgggggcgctgaggtggggggatcacttgagtccaagaggtcaaggctgcagtgagctgagatcatgccactgcacaccagcctgggtgacagagcaagaccctgtctcaaaaataagtgaaaaaaaaaaaaaagcctaaaaatctcccacatgcacataataatttaagtgatattggattgtcgtttactacttatatgtgcatttctgcctatacatattctatccagtgtgtacacatgtgtatgtaaatatgtagcatgatctggaagtgtaagcaccaaattaagaacagcagtttttagggggaggggaatagaattggtttagagaaaaaggtgaaattaacatttttattctgcctacttcagtgtgcctgcagtatttacaatgatcaggagtgtgtacttttttcaatttagaaaaatgataataataaggtttgcttggggggaaagggtaagtaggatgagaccaggaagagaagtaacttagaaacacatcatgcatcatgactgctggcaccattctgtcctccaatgaagagcgaggctttgagaggttcagcagctcacccaaaggtgtacagccatggtctcaaacatgcttgcaccctgctgtcactcaggtcctgaagcccaggccacctccaaggacactggggtgctctggggtgcagcctgccttcagatgtttcttaaagccactcctactccaccccacccagtgcaggagccaagattgaggaccaccatttgacagctagttcataggatttcatagcacacaaacacatctttaaaggctgatgaggtttccaccaaattgggatttattggtatgctgggtataatggcagctgtgtgtgcctttgactgcaaagacactgggcaggccagagtggctcctccccatttgatatgtgtgtgtgtgtgtgtgtgtgtgtgtgtgtgtgtgtgtgagattgagagagagagggctcgtgtttttctgttgcgaacagtcctttccacgggaacttatattctcctaaggtttgccactctgcagaacttttggaggaaggctttagagtgagaatgtcagtgcattctcagcgtgcaactgtaagacttgcaggaggtgaatgcacatgaaataattctcagaggaagaatatgtgcactggtcagataggaaaactgacctgtaacattttctacacaagaggatttgaatggttttcgtctttaagatttttttttaacattatgcttagtccaccatgctttattctgtcagaccatttgtcatctgcatgcttcatgagaaatgtttttttctcgtgagaaggacgtaagcaatttcgctcctggttgagagtttggtccatagtttcttggtgtctgtgggttggcttctgggcctcgctggctgcagctgatggtgaccagaagggctgttcttgtgagtcattaggggatgggccgctgctgctacctccccaccccagccacctccatcagcactgtgccatactcgcccagaagagcccctggactcatcgcctgcccccatgtttacacttgttaataaaatctctagaattgtggcttagacctgtaaacatccagttccaagaagtggctctaaagccctctctgggggcagagtggttgtcagaagcagaccaggcctcggggtctagattccatccttcactggaactgctgggggctggtagtaccccatctgcaaaatgaggttaaaaatacctaacccttgggttgctatcaagctcagagatgctgtatgcaaagcaccaatcagactggctcacaaagaataggccctctgtcaaatgttcatggttgagtgcgggatgtcaaggataaatagctactggttaccagggaattgaagacagggttcttttacaagcaaaaagattttataagagggtcacagaaacagagtgactcttgcccaacagtatcataagcaaataagctgtgtctagatcctaatcatgtgtttagggctctgctgggtttaataagcaacacatagggggtgcgttgtcctccactctcacatccccagtcactagacaaggtcactcccccggggggcatcttactcagaagctctaaaagactttgttgcatgactttggcccttgctcttttaaaatgtccagttagagaccatggcatggagagttttgtatactctgctcccagcatggcaccctctttgcatattgtgggcactcttaaagttatttctcatattgtaatatatcagatatgacttggatatagtcaactagatatttagtgaaaaatgtatcacccccattatcaaaagaaaacccaaagccttcaagtttggcccaactagaaggaatttctggaagggggaagtaccaggaccacacagactctggtcctggcggtgtgtttataagatgcagctcatcatgttggtctctgtcatccctgctaaggctgttcattatggaaccactggccacatgtggccactgaccgctcaattacttaaaaccatttaaaataaatgttgaatttcatttaaaatttaaaattcagttctcagtcacacaggccaggtgtcagggaccagttgccacacgtgggtggaaggtgtgtgtcaggcagagtagaacaggtatttccattgctgtagcaaggtctgccagacaccaagctgctctcagcccatcccctgaggagcccagaagggatatgaacttccacccacctctcccctttcccagttctcagtgccactccttgcctaagtgcacggtaacactcgccactatttcatgtgttgatacctgcagctcccaattttcttaagaggatctgaccctgggaactgatgagggcaccaggagtgccctctcctttgacatgagaccttgagtcttgtccatggggccctggcctggcccttttcatccccaaggctgtaacattctcctgcacaacacaacacacgtgcacacacacacacacacacacacacacacaaaataatgttacttctcagtcacccgggaactgacatggttcccagttatttccttgcagcagccctccaagcggtaacacagccttggagaaagctactaagtcatgtatccttggggtaagcacacttggttcagaatagtttctgaaagaacaaaccaggtttttgctcaagagggttttgagggactggagaaaaccttagtgcttgttcctttctcttcggttaaaaaaaaaaaatccaacatagtttccttgaaacatttggaacctgaggttttgtccattttgaaaagaagatgtagagaggtaacgtgtttctcacgaaggcaaaacaaaaaaataagatgccaagcaagtggcccttgtaccttcaagaccaagaaataaggcgtttgtttctgggaatgccttccatttgctcattttgtaagtaatcaaggcaggctgagaggggagccttctgaggcaccccagtgagcagaggtggggtcctgccactggcccctcggctccaaccttgcctcactccaggcgctggggcagagatgtgtggttggcctgtctctggagttcctgtgctgcttaatttgagtagagataaaaggccacaagagaagtcgttttgaagggtttgtgaattataggacttcctttcatgattcagcctgactccaggaagtgcagtcacgtgctgccctcctaggggagcttcgccccaccaccagcactcaggctccacttactgcaaaaggcgcgatcaagattcttcttcctgaattattgtcttaacaaaattgatacgtctaaacattgagttaacactttcattcactaaaaatgttttcctgaatgatgcttttcatgtgacttctttatagtcccacgtgaaaaggggaatgtgctcggctctgtgcttgttcccctctgtttgggagcctgcgctgctgctcacttctgcagtcagctctgtttggatcagttttgaaccccagaaccttccacatagaggtgataattctagataattctagagcaactgcttctctatctggctgtatgctaagctctctagagagctttacaagggagagattctgagtgttagggctgggaaaagagcactctgtgtgatcctaacctgcagctgaaatgcagaaccactgttctcagctggagcttttcattgttttttgtttgtttgttttgttttgttttgttttgcttgtgaattgagcttactaatggaagcaggagcttgttctgtttagcgatcgtgagaaccacctaggcagcggagcctgcccttagaatctgcttcactgggctgtactgggctgggcattggcaattttaggacacatctagatgtgtcccaagcaatctgatattttgatgtttatcttacagagaagcatgtgtttagaaggcagatagctgtgcttctgttcttctgattttcgacagagacatcagaaccttccacagtcattttagtctaagtcctgaaatcgttcactgccagccctgagtctagctggactatatgcctctggttggacacgtctgccacctctgagaactgtgtggatgtaactcttctgtcttctggctcgttgtgtttccaaggagaagcttgaggcccagtaatacttaaaaattttttggacaaatttaatcttacataattatggggtacacagtgatattatatctgtacaaggtggaagggttgaatcaagccaattaacatacccatcatcataaatgcttatcattaatcctcctctctatctgcaactttgtagtctttgactgtcatctccttattccatcactccccagcccctggtaaccactattttgttctctgtttctatgagttcaatcattttagattccacatatgagtgagatcatgaggtatttgtttttctgtgcttgacttatttcactttacataactttctccagcttcttctatgttatcacaaacaataggatttccttctttttcatggctgaatagtattccattgtgtgtgtgccacattttccttagccgtttattccttggtggacttttaagttgattttgtatcttggctattgcgaatagtgctgcagtgaagcatgggagtacagatatcttttcaacataaatttgtaaactttcttaaaacattatgagttttttgttttgttttgttttgttttttgcaattttttgtttttggctcatcagctatcattagtgttagtatattttatgtgtggctcaagacaattcttcttcttccagtgtggcccaggaaagccaaaagattgcacatccctgctctagaggttcctggataagatgctcttttaacccctgtagacaagactttttttatttctggaaattttataactttaaacatgtgttttactcctttattttaattctctatttcagggacattaattttatatattttagatcacccctgtctttctcaatttttctgttgaattcctgaagtctttgttaattcctatttcatttttctcaagctccacagatcctgtcccccatgctgcctgcagtgttaatatccattcatttttccctgcttgatataatagccaacatttcttttctggccttttctcctgatctctgctggcttatcattgttttttgttttttgttttttggccccttcctcccttttgagctgttattttaaccaagtgattattctgttaagttctttgattccatatctgtgtgtgtggacatgccttcatctgccttttgggacatttttctcatgaaagtcctttgccatttgtttctcctgttgcttctcttctttaattatttcagcatcattgtacaaatccaaggtaggatcctcatctttgaaatagatcatggaagggccttggatgtgttccagtttaccagaatatttcctcccttctcaataatttgttgtgtgtgtgtgtgtgtgtgtggagagagagagagagagagagagagggtgaaagagagagaatgaattggtttaatacatatttctccccagtgaggctgccagccattcagtctcctctcttcaacactctaagaaatggttggctttccattgctgtgtatatccttccactctgcaggccttgtctgaagtctacagcagccagtccccactaagggtcttcatgatcccagggcaaacatagctgcattgggctccgcttgtggcatgttattgctcaggatcggggtgcccactggttccattttatttctttatctggttcttgttgcagggtcatttcagagaggagggggcagtatctctgccaacacccaagcaatctgatattttgatgtttatcttacagagtgacttagagtatgtggcattgaaaccaatggttaaaaatcaacaaataagcaggaaacaacttcagaatgaccaaaaaagttcctggggcactcttagcttccaccagcctctctgatggtcaaccaggccattttgttggctttgatccgttcagcacattgagttatggggcgcctcccacgtgtcaggagcagggtgaggtatgggggctgtcgcagcagctgagatgcttccctgcacttgacttgtttacggtcagatcgtaaggaagcatgggagcccagcatcaggctctgctcatgcataatctcatttattagtgacagcaaccatagggtttttctttgtgaaaaaaattataaaatacagaacagtgcagtaccacccaaattaataaatgttgttattttaccatttatgcctttatttttcctaaaagaacagtcccaataaagtggaagctataaccttttatggatgaggaagtggagagtaatctgctcaaggctggctagctggtgagcagcaggcctggctcaggcccctctggtgcccctgatttaggcttcatggccttctctaccctgcaggaattatgctggctcagctgtgcaggttggcgactgcaaatatcaacccctctaataggaaaccaggcagatttttctcatgctatcagctgatttttggtatatgtaaataaaacctatgtttttgagagtagcaggaaacattttgttagaaaaccaaatgaatacagggagatatggctatcaggagctgagactgatattataattttccaagtactagtatctgtgtattgatttttacagtaatttgtactttcccatccagcttgtttgtgaccactgaggcccttggtgaatatcttagaagtcactcaaaatggataaagaatgaatgtgagtcacccatagcagtcttatgtgagataatatatggttgatcctcagtattcatggcttctgaatttgtgaatttgcctactcacaatcacagtcatttatctgtaatccccaaatcaataaccatgatgctttcaagaccatttgaggtcatacacacagtgtattagttcattttcccactgctgataaagacatgcccaagactgggaagaaaaagaggtttaattggaattacagttccacatggctggggaggcctcagaatcatggcaggaggtgaaaggcacttcttacatggtggcagcaagagaaaatgaggaagaagcaaaagaggaaacccctgataaatccatgagatcttgtaagacttaatcactattacaagaatagcatggaaaagactggcccccatgattcaattaccccccttccttgggtccctcccataacatgtgggaattctgggaggtacaattcaagttgagatttgggtggggacacagccaaatcatatcacccacccctggccccttcaaatctcatgtcctcaaatttcaaaaccaatcatgccttcccaatagtcccccaaagtcttaactcatttcagcattaacccaaaagtccacagtccaagtttcatctgagacaaggcaagtcccttccatctctgagcctgtaaaatcaaaagcaagctagttacttcctagatacaatgggggtacaggtattgggtaaatacacccattccaactgggagaaattgtccaaaacaaagaggttacagggccaatgcaagctgaaatccagcagtgcagtcaatttttaagctccaagatgatctcctttgactccaggtcacacagccaggtcccattgatgcaagagatgggttcccatggtcttggacagcttcatccctgtggctttgcagtgtacagcctccctcatggctgctttcacaggttggcattgagtgtctgtggcttttccaggcacatggtgcaagctgtcagtggatctaccattctgaggtctgtaggatggtgaccctctactcacggctccactaggcagtgccccagtagggactctgtgtgggagctgtgaccccacatttcccttctgtgctgtcctagcagaggttatccatgagggccctgcccctgcagcgaacttttgcctggtcatccaggcattttcatacatcttctgaagtctaggcagaggttcccaaacctcaattcttgacttctgtgcactcgcaggctcaacaccacgtggaagctgccaaagcttggggctttcaccctctgaagccacagcctgagctctacggtggcccctttcagccacagctggagcagctgggacacagggcaccaagtccctaggctgcacactgcatgaggaccctgggcccaggccacgaaaccactttttcctcctgggcctccaggtctgtgataggagggactgctgtggaggtctctgacatggcctggagacatcttccccatggtcttggggattaacattaggctcattgctacttatgcaaatttctgcagctgagttgaatttctccccagaaaatggatatttcttttctattacatagtcaggctgcaaattttccaaacttttatgctctttttttttttttaataaaactgaatgactttaacagtccccaagtcacctcttgaatgctttgcctgcttagaaatttcttctgccagataccctaaatcatcgctctcaagttcaaagtttcacagatctctagggcaggggcaaaatgctaccaatctctttgctaaaacataacaagagtcacctttactccagttcctaacaagtttctcatctccatctgagactgcctcagcctggaccttattgttaatatcgttattagcatttttgtcaaaaccattcaacaagtctctaggaggttccaaactttcccacattttcctgtcttcttctgaaccctccaaactgttccagcctctgcctgttacccagttccaaagtcacttccacattttggagtatcttttcagcaacaccccactcttctggtaccaatttactgtatttgtttattttcacattgctgataaagacatatctaagactgggaagaaaaagagacagttccacatggctgggaggccccagaatcatggagggaggtgaaaggcacttcttatatggcagcagcaagagaaaatgaggaagaagcaaaagtggaaacccctgataaacccattagatctcatgagacttattcactaccatgagaatagcatgggaaagactggccccagtaattcaattacctccccgtgggtccctctcacaacatgtgggaattctgggagatacaattcaagttgagatttgggtgaggacacagccaaaccatatcacagagtggcacaaaattttagccacatgcatattccagacgctccaactcctcctttcacctcatattataagtaagtgtctttttccccagtctacttagtgccgtattttttgcatttttgttccttttttcaaattgtggtgactttgctgtttagagtacccccagctgaagtgctatctggtgtccctaggtgtaagaaggctgtgctgtgccttacagggaaaatatgtgggttagagaagcctctgtcaggcatgagtcatagttagtgctgtcggccgtgagtccaatggtagtgcatcaacaatagatatgaaataaggtgcctttacacagaaacacataaaacaagtgatgcattgatcagttgatgaaaatatggtgacggcaggctctcaggcacataacccctgagaagcgatgggctactacttgctaattcagttttgggggtgactttgtggaatgtataacctgaaataatgagaataaactatattctacttcttttacaaagcaaggaaataatttttaaaagcaagttaaattttactgtttttgtaagagatatgttttcgaaacagttgaactgttttataacacagagaaagtctctttgccttacattttatattagttaattaagtcagcagatttttcttgggctcctgtgatgtgactggcactgttttggtaccaaaagggcattgcaaaaaaagtccagaagtagacagatcacagccttcaggattaaaagcagtctcatcaatgtgatatttcgtttaaacttagtagcaagcccattgaattctcaaaatgagaatctgctaattatcacacacttttcttatgaaagaatgatttttcatagtcaatatttctaaaatataatgtctctttctcattagcagagaccgattgtatggcagatttacttgcacctgcggatgctggagataggtgatgatttagtatagtgcacatccaccaggcggtcctcctgggtcccaatatttaggcccacaggatgagtccaggtgatattgggcacaggctcactcagaggctatcagacagaaagctctgcctcactgcacagcagcttcaagcattgccttcagtgggagtcttacttgcagtccacacagctcaggtacaaggcccctgaggtccacacctggagctaatcatctctttgaataacactgtagacatagctaccagaaaataaaagaaatagaaaggcatgattaatacaagcctcactaggttcttattgtgaagatctgagaaagagctcctcatggccctggcatgggagggaagagtgataactgtaaaatacccctaggctttctccatgacaatggttactctccaagggaaaacactttgcaagagccttgtctcagctgggaattcccaagggaattcctcaagttccagcaccctcatcactttatcacttaaaggacaaaaaactcatagtcaacaggggtcagcgcttcaaggaaattgttacagaatggtaaaggggtcgaatatccaagaagacataacaatcctaaatgtgtatgtgcataacaacagagcatcaaaatatgcaagacaaacactggtaagactgaaaggagaagtagacaaatcctgtcttatagttagagattttaatctctttctcacaaaagttgatagaccaaatagataggataaaaatgacctaagcagtactgtcactcaacttgatctaattgacatttataaaatattccattcaacaacagaaaaatacacattcttctcaagctcacttggaatattcaccaagatagagcacattcttggaaaacatgttaacacatttgaaagactaaacgtcataccaattatgttctcagaacacagtataattaaactagatatcaacaacaaaaagatggaggttttgggaaatttcccaaatatctggaaatcaaacaacagacttctatataacctatgtttccaagaagaagtctccaaaatttaaaaaaatattttgaagtgcataaaaataaaaatataatttatcaaaaattttggaatgtagcaaaagcagtgcttatagagaaatttatagaactaagtgcacacattaggtaaaaaatatataaagaaaattacttgtgattctacttttaagaaactacagaaagaagagcaaattaggcctaaaccaagcaaaagaaaagaaataattaaaatgaaagcagaaatcattgaaattaaaaacaggaaaacagtagagaaaagtcaataaaaccaatgttggttctttgaaatcatcaaccaaattgataaacctttaaccaagaaaaaaaaaagaaaaaaatgtagaagatgcaatttaccaatatcagaaatgaaggaaaggtcataactgttgatctaatggatataaaaagatgataaaggaagatcatgaacaactctgtactcacaaatgtggtaacttaggtgaaataaactaatgcttgagtgacacaaactactaaaacttacagaagaaataggtagcctgaatagccctatatctttaaaatttaaattaatataacctttaaaacagaaatcatcaggcccagatgggtccactagtgaattctgtcaaacacttaagaaagaaagaataccagttttccataatctcttccagaaaatagaaatggaggaaacagtttctaattcattttatgagttcagatttcacgtaataccaaaaccagttaaggcattacaagaaaacaaagcaatattacttatatatacaaaaaccctcaacaaaatgttagaaaatcaaacccaacaacgtatgaaaagagctatgtaccacagccaagtggaatttattccaggtatgcaaaacaggttcaacatttgaaaataaattaatgtgatacatcacatcaatgggctagagaagaaaaatcatatgaccatgttaatggaggcagaaagggcatttgacaaactcaaaacactctttcatgtcaaaaaaaaaatcttaaactaggaatagaggaaaacttttgtaacttgataaagagcattaaaaaaaaaaacctacaggtaacatcatacttaatggtgagagactgaacactgtccctctgatattgaaaacaaggtaagactgtcctctcttaccactctgttcaacatcctactgggagccctagctagtgcaagaaaacaaaacaaaacttatacagatcagaaaagaagaaataagacatcttttttcacagataatatgcatgtccatatggagaacttcaaagaatccataaaacaactctaataaccaataagtgagtctacaggatgctagatcaatatacaaaagtcggttgctttcctatataccagtagtaaactattgaaatttgaaataagaataattaccatgtataatagcaccaaaaagacaaaaaaaaaaaaacacaagaaaatacttaggtataaatctaacaaaatatgtacaggatctgtatgcagaaaactacaaaataatgatggaagaatcaaagaagatgtaagtaaatggaaaagtagtccatgttcgtacattggaagactcaatgttgttaaaatgttcattctgccaagcttgatctgtagattcaacccaatcccaatcaaaatcccagcaagctgttttgtagctaatgatgaaatgattctgaactttacttgggaaggtaaaagatctagaatacccaacacaatacccactaaaaaggacaaagttggaggactcacactactcaatttcaagtcttactagaaacagatacaatttctgcccttatgggacaaacagacattcatcaaaaattcacatgctagaaagtaaaggtaaattaagtcaaaacagtggtcagtggtacaaaaggaaagcatgttagttttgactgtggggacagggacatgtttatcctgagctcaaagggtagcctggacagtggaggatttttagcagagaaaagggccacagcttagaacatgtaggaagggagcaaggtgggggcattgacagccagagctactcaaaagagatgtggaggaaaaggatgttatgtggttttggagacaagtaggcatgtgtgggaggctgagacgtgagatgggagggattggcaaggggttgactttcagcagtgtagagaagggaatgatctaagagagcttggattttcatcttcataaatggatggagctcttgggccaaggttctcaaacttgagcctttaaaatacaaaacctagagcttcaccccagagtttctgatttggcaggtcagggtggaaccctaagaattttcatatcctccatgtttcctggtgatgctgacattgctggtccagagacgcacattgagaacccagctccagggaacaagaaggagctccaagttaggcaggaaagccccaagcttacatttggatgggttgactatgagggcctttgcactgccacctgaagatggtagctaagagaagaggcaggcttcaaatattggctccaccacatactgtgtgttcttcagcaagccagttgaccctcctgaggctcgatgaccaggtctgtgaattgaggataacaatagtatctaccattagggatgttgtgcacatcagttgataacctttgagtcaagtactcatggaatagctgttttgcattatcctcatcaccttcatcatcatggccattctggccagcactaaagatgtacagccaacctcttctgtggctgaagtttatcttctataaaatgagaacttgtttttcatgaagctgtcattttcacaagtttggggtgcaggtgcagattgcctactgttgtgtttctgaacacttccctcgcgaggctcctaaccccaccccagtaaactcatcaacatgactccttccagcttctacagctctggagagggttcctttttatcttgcgtttccagggatgtttcacggccttttgtggagtgggccctggctgagcttctggcccttcttgagtgtggaggatgtcacagactgcagtgggaaattaaaaagctgcttgcttcacagagtaagggaatgttagtagatgcttgaaaagtaccctgagggagctggtcagaggtgctctgtaaagttgcatctgttgctagcaccatgagcagctgtctgaccaggaggcctgggaacagggacagagagagctggcacccttctttcctctgccctacacattggcctttccgccattaagaccatctctgcttgactttttcagtctcctggctggcaattagcatcttgaggtctccattaagatcttttcaaggatgctcttcctatttggttcaatcttctggttgaatttgatacatgttatgatgtaggactttttaaaaaaacataaaacaatcaggaaaacctcgctatacccattccagcaattcaagaccaagttcatttttggtaaaaacacttgggaaagggcatttccaggctggctaagcactaaatggcacagccctgtccactgactccctcctcaactggtgtgtgttctggagggatccatgtctcagagcattacttcattttgaatgtgcaattaaaagaggccccgtgctgctggggatctcacacttctgctttctggtttgttttgcatgctgacactttgaggaaaagcccatttccctaattacagacatcgtccagcagcaggaagcactctggcttgttgatgcctgtcttgtgctttctctctgtttcagctgttttccttttaagatactcctctcagatttgtgtgcttcttcccttcccacattctatactgcccagcgcctgggattccagatctgcgtttgaatccaggaaagggaggtaggtcaaatttgtgggaatcaagcatatttagaaaccctaacctcaggctctgcgcatctgtgggtgtctgtaggagggatacttaggtttcatgcctgcatctgcgtttcctctcctctgccgctaacattcttccactgagcacatgtccatcttgagctggaaggtttagcggtttgccatcttgtcttgcctgcagttatgatgcagctaaagcatccttctctccttcctataacctatgccactttgctttaagcattgagtatatttatgtctcaggtttatgaaagacaattataaaatctcaggagaccatcataagctcctgtaatatcttgcagtcctgagtcacccacaattattttttaactggctaggaaaaagaatgctagcgatttttttttaaatagacattcagtaaaactctagatatttcttaatccacatttactgtgtcctttttgcttaagtcaggtgttttggtttctctagcagctgcaggatccccataaagattatgctcataaggtagtgatggaaaagtaaaatagagcctgaaagcgggaaacttcagcaaggcactaaggcacagacaagagatgttaggtctgccggctgttgtcattgcagtctgctgtggcctcacccccgcccccccccccgccccgcccaggccttcacagctgagtaggaaaggatcttgggatgggtaccagggcaggatcaaggaaagcctgcaactgcgctgcccttctcatcatccatatgtggtttgcccagataaaagcaatatagtaagatctatcaggcatattcaacgtgagttcttttttctagcatcttgttggttgtttgtgtttttccccagagaagagtgagtgatgaggtggccctgggacatggtagatggtgcagttcactggggagacatccttggccccactcagggtcaatatgcgccccacaccgctggctgcaaccccaccctgtcctcttctgctcaaaagagcatgcaagggacattgctaagtggcaattttggttgcaacccagtgttctgttaattattcacaaaagctagctctctttttaattaccaattgtgtgtgcgttgcgtgtgcgtcccttcccccttctctgagcacacctgtatgatgaggcatgtacttcttcctggtggagaagaactgcagagatgtctcccaggttgagcctgcagcctggcccggtcaccagcacagcacggtgacttgactgtcctccctggctcccttccccacccgtggcaagtggcaacttgctttcgctcacactgaacgtggtcaacttgcctccctgtcacactgtagcacttgaatagggcaatattagattatagcagaggttctcagacattagagtgcttaaaaatcacctgggaagcaggccaggcgcagaggctcacgcctgtaatcccaacactttgggatgccgaggtgggcggatcatgaggtcaggagtttgacaccagcctggccaacatagtgaaaccctgtctctactaaaaatacaaaaaattagctgggtgtggtggtgtgcgctgtagtcccagctactcaggaggctgaggcaggagaattgcttgaacccaggaggcagacgttgcagtgagtggagatcgtgccattgcactccagctggggtgacagaataagactccgtctcaaaaaaaaaaaaaaatcacctaggaagctgtttaaaatttacccttcttgtccgtatgccctatttgctgggtctgaggtgggcccagaaccctgctttccagaagggagcctgagggtggggtgccctgaagaccacactcaggaagaaccggacatgtgagctttcatgagccagagtcctgccaagaactagaatctgcaggtggctttggccagtcccacttagaggcaagaagacgtgaggatagtagagaacctggaaatcacgcagtccccaggatgaaagtggaactctcggaccagatccttattctcttactttcgtgagccatttctgcctacctgttgtcagggaggcaggaggttcatttttctctcacatggtgcctgacataatgacttgcacgtgatagatgctcaacaagcatattgaatgaatcaatcagttagattgtaaattaaatgcaccagatgggctggttgtttatttataactacacagttaacatttatattaacataatgttaacaccaaagcgtaatatctgttttctgtgttaattatggcaaggtgggcatagagaagagatttctgagtgtcttttgcagagcttgaaaatgtctatgtgttggttgagatagatcagcctttacttgatgcactttcaatcttttaagttctgaaggcacagcaagagaatttggtgttgaaggtttggataatgttttcaagtatttcaatatccctctatttctaaacattagtaaaaatcatgcctcatgctaccatccttagcttcactttgtgtttctgaattgtgtatctctatatactaagaagtcccccatgtatgcctgcaaatatgggagagtcaaccgctcagcagaatgtgcacaatgtaaggctgtgccttggagaccaggcaccctgtgcagtgtgatgcacaggcaggcctcaggatggcgccgtggagggcaagtgatacctactgacgaagccagtggagtggatgcaaggccaactcaggccctgcagctggggttctgttcctcagtgttgaggccacaggtctgtgtccacatgttttcttttgtacagtgggattctgccgcacaaggcagtgcccccagccctttgcagatgagtcaaacatgcttgtttgcagagcctggtgctgggtggggtggtcccatcacatcacctcttccttggtcatttctctgtaattaatcagccagtccctgaccaaaccagcaagatcaattctccctctggttggactcattcctcttttttttttttttttttttttgagatggagtctcgctctgtcgcccaggctggagtgcagtggcatgatttctgctcactgcaaactccgcctcccaggttcatgccattctcctgcctcagcctcccaagtagctgggactacaggcgcccaccaccacgcctggctaattttttgtatttttagtagagacggggtttcaccctgttagccaggatggtctcaatctcctgaccttgtgatccacccgcctcagcctcccaaagtgctgggattacaagcgtgagccaccacacccggcctcctctttcttatgaaaattaacccacagatgaagtttcctttcacccaagtcttgacaattttctcagcttcaagctgcagaggaaattcctaggcacatcttaacagggctgctttgcattgagggggctgtgtggtttgagcgtgataagcctggatatctttctgcactatgctgatttttgttcccttaaatggtatggatttggcaacaattgtttgcaggtgatcttttcccagagaaccacttatttcccccactgtctctgtatgataggagggctctaatggcccagggatgtgaaagtgagacaccttcaatcgctaaggactgctggaaatgtgaactacaggaagttgagggggctggaggggaggaggcagcacctgccggagccatgcttcagtgggtctcaagaaaagcagaagcctggaatctcagggctgaggccccttgataactaggacagatgggttaataaaaagggatacagagacataggctacctcttctggttcaatgccaagctagaaaatcctgaaatgaacacagatttatgagataggagtaatatatttaagaacacagtcttacatagagataactattttcccaaaacatccaaggtaaatttatatatctttatggatgaggttgggtcttttcagggaaggttggggagacggaagggaaattacttattatcagtcctcatgattcatggattccatatctccgcattcatctattcatttaaatctgtttgcaaccccaaaatcaatactcacagcacttttgcagtcatttgtgacgtgcacaaagcagtgaaaaatttaagtcacccaacacatacgttgaggtcgcacaaggtgacactctgctttcttgttttagctcttataaacacattttcttttctcttggcccatttagtccatggtttttgcatttttgtgcttttctggggtgattttgctatttaaaaatggccccaaacacaatgctaaagtacttactgtctggtgtctctaagtgcaagaaggttgtgatgtgctttacagagaaaatacgtgtgttagggaagctactttcaggcatgagttattgtgctgttgaccatgagttcaaggttaatgaatcaacaatatatatgaaataaatatctttaaatagaaatacacataaaacaaggttctgtattgattgattgacaaaaaagttgtaaccagaggatcacaaaaacctaacaccatatttccccaggagcaactgttcaggatttgcaaattcagctttcatggtgattttatagagcataactattgtgaataacaagaagcaactgtattttgtttcatgcataagatggaaagagaacagaaccagaagtatgatatcgatgaaatggagagaggagaaagaaaagaaagaaatgacactatgaagatttattagttaaaatgttactagtgataataaattaatcagaactttggcctctgcctttgatcctggttcccataatctctaagtgccaggctcagataatgtggcccttgcagggtttgggcagctagtcctctaaccattttctacaggtaaacgtggacatgaaagaagccagggtgaggcaggcagcttccagaagcacacactgggctcagctccttccttcctaacctctattttagctccacgtacctcttcaataccagaaagtcttcttctgattctgccagagcccagctcctagaacctagctcatacactcaccagccttttttgtcaacaattcattcaaatatttatttacttaaatatccattaagcactgttgcttctctcgcccaactccattgcacatgctatatcagttatctgttgctacataacagatcactctaaacttagtggtttaaaacaacaataattacttattattgctcataatttctgtgggccaagcatttgagatagctgggtaggctcaggccctctgtagggttgtagtcaggtgtgggccagggctacagtctcatctgaaggcttgatagaggctggaagatactattccaaggtggctgctcatacggctggtcacttactgctggctattggctagaggcctcagttccttaccacatgagcctccccaaagagctacttgagcatctttccaatgaggcatctggtttccccagagtgagcaatccaaaagctgaggaaaagtgttaagggctttcatgagctagcttcagagacccaacattgtcactctgcagtcagccactctgtgtgcaagggatgggagtaccaggaagtgaggatcactgggcaccatcttggaggctgcctgccatgtatacattttaactctcaaacaaaatttgaagactgaagacccatacttaaagtagcctctgttccaggcagtagagaacaaaatgtaaacgtacttacactaatggagtgtctattctagtggctttggggaatatagacaaaaaaacagaactaaaactctaaggtgggacagggagctgggagtgttagtgtcaggtgggcctatagagctcagccccccttcatcatgttggcattcatgctggctgttcctctgtaggggatgaaattttcccctgccagaagaatgggctctggacagcttgttcagctgcttgctcaggtgtgagcatctgtgcctaatcttccagtcagactgccctagaaacatcatttcttaattagctgaaagggtatctgaaacattgtacttatggtggcaagcatggatctattgctcttcatctataaagttgctgcctgataaggtagaactacacaaatgatagtttcccaactaaatgcattttaaagggcaaaggttgtatagtcagctttagtcctggcataggggaaatggactatggaagtctagttggaagagaagattgaaacatgccagtaagtgcaaaaggatacagtataatttaaataaaacacatggaagacatgaggatgctagtgggatatgatgggctcatccatttctgcaggctccaggagggtggctggcagggcttctttggtgtggggcagaaagaatcaaagcctgtagaataaatctgactccgttctagatttaactcctcatggtgtatcacgtgcaaggtgaagcctgactggcactagggaggattttgaggtaaggaagcattgtctttggttcagtccaagccctcactgactttccaccatcttcaggtgggggtgggcatgtccgtctgtctcccagcctcatgcacacacatgtgtgcacacacatgcacacacatgcatgccttcttatgaagtgtgggtctggctgcccgtgctttttccttcatctcaccatgacttatccttccctcttctattcaaagttcccacttgagagggtccagttgccctgggcacccctccacactccccactcatgactgaaattagttacagtggctttggtatactgtcatcccctttcaccagtgaagaactctattgctatagtgcccaggtcacacaaagctgggccgggtcgccagcgttcccgattctcacctctgtgtccctgggtttcctgctctctggcccagtggaaccacctccacggggtaccattcctttccagccttgtcttttgttcattggcaatgatgttaacaaattaaataggggaatatttgttcatctaatttattggtaaaaaggctagaacaagcttatccaacccatgacccataggccacatgtggtccaggatagctatgaatgtggcccaactaaaatttgtaagctttcttagaacattatgagatttctttcccttcttttctgtagttcatcagctatcattagtattagtatattttatatgtggcccaagacaatccttcttttatcagtgtggcccagggaagccaaaagattggacacccctgggctagagcaataaaatgggcacatcagatttgtgtccacaacagctgacacagtggtttccagtcaggggtaagttacccttagggaacacttggcaatatctggagacgatgtttggctgtcatgattggggaatggggtgctactggcatctagtggggagaggccagggatgctgctcaatagtctgtactagatgagacagcccccgaccctacacacataacagagaaggatccagcccaaatgtcaagagtgccaaggttgagtaaccccgagctaatgtgatgaatggtgccagatggaaatgggtgggaccatcataaggagggggaacagggtaaaggcaaccatcttaatttgtaaattgagtgtgggggatgtgttttgaccacatgcttttgaaaagggaagctgttcattctccagaagcccagcggagatgttggatggatggggccacccatagctgcattcatggacagctggacacgggcccaggaaatcttggcagcgtcactggggccggtgcacttttaagaggagcttgggtgatatgaaattgtttggacaaaatgagtgagaggtcttgaaataatgtcaaggcaggaagaatgcattgacttggagtggctgccaagagcaagcatttgcaggttgttttggggaagcagaactggctgtgttctctttgtcctgtgcacagttggaagacgggaaatggaggaggagagatggggaaggagagatggggaatcagataagaaagtgttttccaacagaagcatcggcacacattggagtgagttcccttcccttaagaggccaggagcttatgtaggaaccaagctccatctgaagcagccacagggctggagcatctcgcagattagttgccagggttctctgattctggccctgttagcctccatctggacacacagcaattgcatgtttagcatttttattacaaaagcaacatacaattttgacccttgaacgttacaggtttgaaccatgtgggttcacttatatgcggattttttttcaacaaaaatattggaaaaaagttttgaaggtttttgacaattttaaaaacttgcagatgaactccatagcccagaaatataaaaaatgttggccgggcgctgtggctcacgcctctaatcccagcactttgggaggctgaggagggcagatcacgaggtcaggagatcgagatcatcctggctaacaaggtgaaaccccgtctctactaaacatacaaaagttagccaggcgtggtggtgggcacctgtaatcccagctacttgggaggctgaggcaggagaacagcgtgaactggggaggcggagcttgcagtgagccgagattgtgccactgcactccagcctgggcaacagagcgagacttcatctcaaaaaaaaaaaaaaaaagttaagaaaaagttaagtgtatattgaatgcacaaaatatatgtagtctattttttcatttactaccataaaatgtgtacaactctattattaaaattaaaatttatcaaaacttacacataaatacttatatgccattcacagtcgaggaaaatgtaaataaatataaagatgcagtattaaatcataattgcataaaattaactgcagtacacactgtactgctgtaataatttcatagccacttcctgttgctattgtgatgagctcgagagttgcaagtacctgcctaaatcactgtgtgatgctcatcatctctgtgtgagcagttcatctctccagtaaattgcatattgcagtaaaaagtgatctttaataagtgatctcttgcagttctcaagtatttttcataatgtttagtgcaataccgtacaacctgaataacaccatgggtcccatgtgaagggtcacagtgaggctggaagtgctcccaagaagtcatgacattataagaaaaagctgaattgcttgatgaggattgtagatggaggactgtagccatggttgcctgccatttcagatggatgagtcatcttgtaaacagatgacagtaaatttatggtattgataaatacagtacagtattgtaaacatatattctattccttatgattttcttaatgacattttcttctctagcttacctcactataagaatatagtatatgatacatataacatgcaaaatatgtgttaatcagttatttatgttataggtaagccttctggtcaacagtagactattagttaagttttgggggagtcaaaagttacacatgaatttttactacagggtgggtggtcagcatccccacattgttcaagggtcagttgtatattcactgtggaaatcctaaaaagcaaagagcaacatgtttccatcaagcaggattttgccagcctctggttaaaccctgaagcctgagcaaggcagtgaaatctccagacctttggggctcacattttagggaaagggcaggtttgtgttgatgctacaaaggtaatagatgcttttgagaagttaactatgtgcgggggtggccaaggtaggccgaagcagcacctgagactggatcatcatgatgcaactctctgagtaaaggcctgagaaggaggaagccaagcaggaggcaggagaggcctcaacctggaggcagaagcacagtgtggtggagatagtgagcaaggtgaggttgcaggtctcgggcctggtcaaggagagccttgtggaggagcaatgaagatttgcgatgtgatgtggatggagaggttccttgtgagcctcactccaccttcagggtagggaattgtcagtaaggaaaggaaggaccaggtgagacttccaatacctgagagatggcggtggcttccacgagggcagcctcaggagctatggggagacatgatggcttgggaatatattttaaagaaaagctactcagaggacctggagaccagctcatctaacctgcttcaagattctccatccctgtgactgcatcagatggagctcagctcctgcacaagctcatggcttccctgcatcactgtgagtggccaatgcttctggtagaaagcacattcctttctgacttggtgagagggaagactcctgaaagcagccagggtctcatcctcagcaactgtggtgctcaatgtcatttcctcaattaggagagactgagggaggaagagatttgctgagggagtggcaggaggagtcaaaagcctcatctggagtatgtggaggtcaacttgtctgttacacatccaaggggggacgtcagataagcagacatgcagatcaggagctcagtggagagaaataaatacccattaaccaacaaatatttttgatgacttattctgcactaggagctgttccaggcatggtgatatggcagtgaacaaggtcatcctattctcacctcccagagctggccctctggtgggaagaacaagacaatactcaaattcaacagtgaatcatgatttaaagggctgctgccttatggagatgtgctgcagagaaaaattaggcagggaagggaggtatgcggcccaggacattacagaagattatttcatgtcaaaaaacatttttctacaactaagtgcacatttaacttgtgtcacaaaaaaggtctcaaaagagcaagggatttgcagtgttttcaggagctcaccagacacctgaaaaccctccttgctgaaccactacctgcccaggtgttcactgaggtgccagacccagcaggctgaggggtacaggtggagttaaggaggagctaagtggcctggtttgtttctcagtttcgtgctttggaatgaagtagtgtcacacatggaaaaaaataactgggaatgttgaattaagaaaaaatagggagcaagttctaaacactatttggaagaaaatgatccctgggaatgctaaagagaatttgagccatgagctgttcctgtagtcagagttaagcattgtgagttggcaaaagcatcaggcgggaaggactgagtctgtgtgtgcaggaggaatgcctgcaggggaaagtcacgggctccgtccctgtctcagttggtgggggtggcagagatgccacagccgtggccaagactacgctgggtgaaaagtgagactctctggatttgccatactgactgaaagctgatatctgaaaagtggagctgagaacagcagcctgggccactgtgggcagtgactggaatggagatggccatttcctgccaaggtggcctgagaaagaggaggttggagaccaggacaaggccccgggtgggtgccggtgggtgccagtcctgagaaggtatgcacaggaacaccatggacattgtttattcccccaattaagtagcccaaaaatgtgccataagctgtccttgcagtgaaccagtgattctgcccaaaccatcaccaccaacatacccaggtcaactccggcacaggaagtcacatggccagaaaagggccatcagccacatcggtgctgacactgagtgcagcacattcttctgccacctgcttgcgaacatatctgcaatgcaccatcaaagccacacagagtgtccctggcgtgtgcctggaggttgctccgggtctgcagatgctccccaagacccgaccacagcctgtctcacttcctttccattcacttcaatatgggattcatgcccaagtgccagcaccgatgtaatgattagtgacaagccaatgaatttttaaaatagtagctatgttaagatttatatgaattaaaaagtatttgctctcattttatttaaaattttgttcctacaaagttactgtctcagtttgagctgatggtgcagtctgctgttctgcaactacataaaaagtaacctgggccctgcagaggggacacaagcatcggggccaggtacacagtgacaggggtatttgagctgggtctgtaaggatgactgagatggctgggaggaagagctgcacgcctcagcagaaagcacacgtggtgagaacaagaagggaaagccacagcatcccggtgcagtccagtgtggtctgtggactgggcatgttggaataggcaggaagggctgatgtgcgctttgagggaggaccgggcagctggagagggaggcgtcaggaagcaggagggcagaaggtgaggagtgaagggcagcagtggaaaggacagggttacgccaagcagtggtcatggatatgggcagtaaggaacatgcaccaagggcgcctggaaaacgaaccttagagaacgcaagtcctgcggaggactcctgggttcctggctgggacaccgcctgggcagggaaggcagagaagatggagaacctggtctcaggtggcatcagaacccagcatccgcatcaccaggattgcaggagcagcagcgtctcaggccctgggtgtgtcagagcccccaggccacgtggaagtatgagacgtgctgggctgcaggggaaacaatggaaatgaggttggaggcccgagaagacccactgcaggaaaagggtggagtgggggaaaagcaggctgggggcagtggctggcctgcaacaaaagcattgtagaatgcaggcgtgagccaccgcgcccggccaaggcgggcagatcatgaggtcaggagatcgcgaccatcctggctaatgcggtgaaaccccgtctcttctaaaaaaaaaaaaaaaaaaaaaactgtagaaaggggaaagcagtccaaagagaagtatttcttccaagagactcatcagcacactgtgtttccagagatgtctttctgttaacagcattcttagactcaaaagtaaatgtagatatactttaaaaaacaaaaacaccttgctaagagatgaatttttagaaacttgttggacaaagaaaagtcattgatagtcaactgctgtgagaggcaagccaggaaatgatgattaataccctcaaattataataaaacccatgcctcattaggggctcgcccaggagtactgacttgtggatagacaccgtctggggaaaactctgtcgcctgtgtcaggctgacgctcttacattttatagccccttgtaggatagtgcatgttgagaagaagccgcttnnnnnnnnnnnnnnnnnnnnnnnnnnnnnnnnnnnnnnnnnnnnnnnnnnnnnnnnnnnnnnnnnnnnnnnnnnnnnnnnnnnnnnnnnnnnnnnnnnnnnnnnnnnnnnnnnnnnnnnnnnnnnnnnnnnnnnnnnnnnnnnnnnnnnnnnnnnnnnnnnnnnnnnnnnnnnnnnnnnnnnnnnnnnnnnnnnnnnnnnnnnnnnnnnnnnnnnnnnnnnnnnnnnnnnnnnnnnnnnnnnnnnnnnnnnnnnnnnnnnnnnnnnnnnnnnnnnnnnnnnnnnnnnnnnnnnnnnnnnnnnnnnnnnnnnnnnnnnnnnnnnnnnnnnnnnnnnnnnnnnnnnnnnnnnnnnnnnnnnnnnnnnnnnnnnnnnnnnnnnnnnnnnnnnnnnnnnnnnnnnnnnnnnnnnnnnnnnnnnnnnnnnnnnnnnnnnnnnnnttttgcttctgaaatgtatttatttactgcaagcagtgtctctcctgtgtcagatgtcctcgtgggctgggaaccggcactatctctttagcacgggccctgcagatgggaagtggcgttgcccaggaagtggtctggagaagcggggagaagacagcctatgggccccaggcctcgggagccagggagggtgtcactcttcatgtctcaggcagtggcttgttgctatcatagccccgggctggaggtgggaaggccttatggtgaccacaagtcacagttccgtgtgggccctcaacgtggcctcacttcacctctggggctcagcaccagcgtgtgactgactgctcgaggcagcgtctcgcagctcaggtgggtgaggtggtggtagcgtcctccttggtaatatcactgtgatgaggagcaaggcttctctaacattgtctggactcaggaggagcagttggtttgttctcatgtagattctgcctcctgtatgctgctgggaccctgagggtcagcccaagagtcctgttttgcaatagcccttctgtttgcttctctttgcggtatgtttatttttagaattctttgtctttccccactccccccaaaaaagaattatttaatttggtcacttccatcaaatgctctgattttagcttagttagaaggcatgctgaaaactgtaatgatgatgtgaacagaaagacaactgtgtgttgggagggccaaagagggaagtgcctttgttcagagatgggagggtttgtctccactttgaaagggtttgagtggttttagcaaacgttccctgccacgtggggtcctcaccaaagttctctgtctctgtcttgcccaggtggacacctgcgcaggtgtgtgccctccggcccctgaagcatggccagcagcggcatggctgacagcgccaaccacctgcccttctttttcggcaacatcacccgggaggaggcagaagattacctggtccaggggggcatgagtgatgggctttatttgctgcgccagagccgcaactacctgggtggcttcgccctgtccgtggcccacgggaggaaggcacaccactacaccatcgagcgggagctgaatggcacctacgccatcgccggtggcaggacccatgccagccccgccgacctctgccactaccactcccaggagtctgatggcctggtctgcctcctcaagaagcccttcaaccggccccaaggggtgcagcccaagactgggccctttgaggatttgaaggaaaacctcatcagggaatatgtgaagcagacatggaacctgcaggtgggccacagctggtcctgctccctgggcccagggggccctgtgaccccacacagacttcctggctacatgcaacacatgtgcctatgtgccctgtgtgcccaaataacacaaccatctccttaagcatcaattttggccaaaaaatgcctctctctgataagagcctttcctctttcacagccacagctgagagggtgggtccctttgtgccagcagtgtgggtttctccacagcagggaaccactgttacccagtgcaaggagggccttttcagagaggcattgataggtgttgattggtttctgtttatctgacaaggtcctaccatacacactgataggcacttgattttatggcttcctaatatctcttgcagaactttctgtgtcaacactcatatagttgcatcacccgttctttggctatctggtatcacctgctatgcaccacaatttatttaactagtacctattgatggacacatttgctgtttatgaataaacgctgctaacaacattgctctagacctatcgtatactacacttgtatgcaacgtctgcaggataaactttgaaagggttgggattgccacagcaaaggatatgtgtgtttatttttttattttttatttttttgagacagagtcttgctctgtcacccaggctggagtgcagtggcatgatctcagctcaatgcaacctctggctccaaggttcaagcgattctactgcctcagcctcccaagtagctgggattacaggcatgtgccaccacacctggctaatttttgtatttttagtagagatggggtttcaccatgctggccaggctggtctcgaactcctgacctcaagtgaaccatcctccttggcctcccaaaatactgggattataagcgtgagccaccgtgcccggccatgttatttttatttatacacttgaaagtacttaagtaatgtgtaaaggtctttctggttttatttactgaatgaatgagtgaataagttttgatcctgttttaccatgccaggactcgagatagattggaaatgccttctgcatcattttcatttttcctcggtatggtttactctgctttgctctccatgtggcagggtcaggctctggagcaggccatcatcagtcagaagcctcagctggagaagctgatcgctaccacagcccatgaaaaaatgccttggttccatggaaaaatctctcgggaagaatctgagcaaattgtcctgataggatcaaagacaaatggaaagttcctgtgagtatcgtgccttccccctcacctcctgccaccaggcctgtgtggacaattgggaataattcagcttccttgtgactggccccacatgaccctgggaagaggccatgcattgccatttgacaacatgcatgctggcctgttctaaagacatttctaaccaaagctatcacttgtgacccagtgtttattttgcccagtctaactctaaaatgaacactctttttgggcaccgagggatgtaatatttaaagaaaatgtgattcagccccatattctccttttaatggcaaattataggttgcatagcacattctgtggttatccaactaaaattaaaatactgcagtttttttactcaaactacccccttgatctcagactttacttctattttacatgaaacaagatgccaacaggaaagatgttaaggaaaagttcctgggagtagcatccatgagtggtgagtgcaggtttgaagacttcagccttaggcccacagtcattagagggtctgtctgaatcctgggttctgtttgctatcctcagtggttcagtgtaaatctaaattgtagaaggttctgagatacaggccaacgtggtcagtcagttgtccagagaaggtaaagaactgtctttgggaggtgtcaaccttgttccctcgagggggtctggtcaaggtggctcagtggggcagttgtccctgggggaaatgatcccctggtcacctctcagtgtccctacagagatgcttaccttggaaacataaccagaaacagcgatgcagcctcatggtttggcaattggtgaatccccagccgacttcgtaaacttttcctagatttagaagcgttttctctgcctgtccatctattcaaaggaatttcctcagacttcactgtcataccttgtattttaaaaatgatcttagctgagtgcagtggcacgcacctgtagtcccagctactcctggcaggaggatcgcttcatcctcactatgatctcactatcgtttgaggctagtttgagaccagcctgggcaacatagtgaggccctgtctcaaaaaaagaaaaaaagaaaagaaaaattgaccacaatactcttaaaaaaaaaaaaaaaaaaggaagaaggaagagtggcccaggttgccacgcggcagtgcctagagtgatggtctttagtgggatgcagccccagccagcagcagaatgctgtggggagggaagacattgcccctcagtggaggcacctatggctatttttgctgaggtttggcttcttaccatctcagcaataatttccaacatgaatgtcatgggaccatgcacatagcatcttggcatgtgaagtcaacccaaaatagcataatccacacgatgaggctggccaacttctgctggttaagaagcctgctcatagcctctttggccacgaagctgtttcttttttcggagttgtctattcccgaaaacagcagttgcatccttcatggccatgacttttgctctctccttcctttctgggagatgtatataaaccccatgcagaaggctgggaggtgcagctcttgtttgatgaacatgccttgttccctatctgccctgtacagactgacatctcatgtgtcctcacagcacatgtccctgacactgaggcttatggtttatgcaagagagtctcaaacttgccgtgcttcctattcagctggtgtcagagctaaccaggcatgggcctgtgagagaggggcctgggcttctgtgttttcatcgagcaccctctccttagttgtcttcttctcctgggttcttattcctgggttcttattctcctgggttcttattccactttatattgcagttgtccagttatcaccccataattgccaacctcccagataatagcttccaaggctttctcccttgtgttgtccacagctcagtcccacaccttcccgtgctccctccacacctgcagggctcacctgtggactgatggtgcatagcaccccatgcccaggcctggcatcaggcagggtattagtgagagggaagagcagagctaagcctgggcagcaagacccagcttcagaacccatgttcccatgatggttgtagaaccttagactaagggaaactttccccaggctctgctcctctgggtctgtgactgtcttgaggattcaatgaaaatacacaccacgtacaccgcacagcacatgtggtcatcactgatgtagcttttcttctctcttcagtgctctttctccatcatgagcaccaggaaagtctccttgtcagggtatcttatggtgtttttaacagagaaagtgtgaggaaacaccttggaggggtttgccacctggcaatttcacctcttgacaacctttcatctcctacagaacctggctggggttcttggctgttgctgggtgtgtaaaccttccttgttgcagtgtagtgggcgtgttatactgtgagtgtttgaatatggttgtgtatgcttgtggagagcagggagagtttgccagcatactggatacagtccaagtctaccatgcttccagcacggggcagggtctgcatccctgaatacaacgtctcccaagtccaggttgcctagacgttggtccagattctttcatctttagaagtgtttgtttgtgtgtttctttcatgggaaatagagctaaaaggctccagggaactcttgtaaaccatcaccagatcctgtggctgccctctcagtgtgagtgcgtcagctcctgattcactgtgggagtctgtcctatattcccctgttgggtcaggccaacgttgcaggaagtcccagacctggttttgaatcatccaaatctgccctacttgcagatagttttataaaatgcacattatttgcaacgaatagccacagcacaaggtctttggagtcagaactagattccagtcactgctggatgtcctcactgagccagctgctgtttttttcccactgttcttctcgggccttcattcagattctcctaacgaatgtgctcatgtctactttccaatcatcatgtcagctaatccatccatggaccaacattactggagtctgtagttgcatgaagcactaagtgccaggcaccattctggactttgggaagggagaagtgaatcagcaagcacctgccctcatggaccctgcatttcagtgggagaaaagacgctgaacaataggaaagaactgcatttaagtaagggcgtagagcacactggggtatggatgctgggtcttctttctgctgcgtggggaggatggaccttgctgtgagggaggccattgagaagaggcctgaaggcagcgaggaaccatccccacccagggaatggcaaattcgaatgccctgtggcaggagcgtgcctggggagcagggcacccacagaggccagtgtcactggcagagagtgagtggagaagggtggagttgagggccaggttgcagagcactcacggcactgggaggaccctgctttgggcaagttgggggggctgtctttaggaagcaaagggccagggccagctgacattcggtgggctctgcctggctgccacatcatcggtttgctgtggggagttgtgcctgtacatatacttgcaaaccaaatgtgttgatttttttatcgtgatttcagggccttcactttctcatgcctgagcatcagtcagtttgtctccgctctgatctcctgtccaccccacccaccgtgcttttacctgggtcctgtacaggcctgtgggctggcccttaagaggttttcaatgaatgcttgtcacctaaatcaatgaattgtttggatccattctccatctcccagctcgtttttgctttccacttcctgacatgtagtaataccactgtagttctgtatgggggcagctccacacctgtctatgttggggagggaatggggattcttgcacctctttctacctcctcttaaatcattactgatggacagatgcagggacacagcaatagatatagaaatataaaaacatgacactgcgcactctatggtttgtaagattcactttctctgggtaggaggcagtgtggcctgttaacaacataccattcgggttgtctggcctcaaatgctggctccaccttatcaccagctatgggaccttgagcaagttactcagtggtctgtttccttcatttctttgtctgtaaaatggctttaatgtcatctctgactcttagagtcattgagggttatagagtatcataaaccgaaggcctgctgcacggtgcttggcaccgaacgaagcagcttcaccccactcctgcagtggcctggaccacacttggatacatcagtaacatacactgaaggtcaggtcctccatgcaaactctttccatccctgcatcacaggtgtaccatgacctctgcaggtgagtcattcttctgcaggtgagaaaaccaggcaggtcccccttatccttcccttctcttcttcagtctgcagtaggtgtgtttatttccactctgtggctatgaatagatagagtgagagtcactggccataaaaggattcacactaggcttttgcttttatgaagtgacagacttaaataaagaataattatttcggccgggcatggtggctcatgcctgtaatcccagcactttgggaggctgaggcgggcaatcacaaggtctagagatcaagaccatcctggccaacatggtgaaaccccatctctactaacagtataaaaattagctgagtatagtggtgtgtgcctgtagtcccagctacttgggaggctgaggcaggagaatctcttgaacccaggaggcggaggttgcagtgagccaagattgtgccactgcactccagcctgggcaacagagcaagactccatctcaaaaaatatatatattattattattattatttcacagagggggttggaagtttatttttgcattgcaagccataaactaatcaagaggattttactagtttggtggataatatgggtaaacaaaatcccagcgattactcttcacactttcatcgtgagtaccaatatgctgtctccaccattcagatgccagcatttcagtctgagaatcgctttacgtggaaagtggcattggtaagaattggactaaaaggtaaaaaaaaaaaaaaaagaattcctgaaatgcatgcacctccatagccatcacaaaatgcctttgctcaaacagaccttgaaaacactgagggtaaggcagcatattttggagatcaaaatctgattataaatcctaggtaatgcagttcaaaatgcagatgatggaagcagattacgtctgggagatgctgtccaactcggatcccagttttctctcctcagaactatatgtgaaatccacttacagtgagagtacacctgagctagagggcatttaccacttaagggggctaaacttattgtttttcaaacaagaactcgggtgtggaggagcttgtccaaggcaggaaggcaaaaccaggtccctgatgttgtctggggctaagcagaaacagcagccagcaaccaaatccatctccagatggatccatctccacaaccacaggcccctccctattccccatgcaagatgcagcaccagggcatgtccatgtgaaatctcagaacacacagaggcgtccatcagctttcccctctcttgtgtcctgtccacagagcttacccacaccattcaggagtgactttgagaaggtagttacagggcctttgcacatgtgcttgaagaataacgaatataaacagaggctctttgtggaggggctgggcagtgtgggtcagtggttgtccctcacagccgcctgtggcatttctggaggtgatgttcatcacctggcctttgctatataagcactgcccttgtctggggtctagctggccagaagcgagcactggagggggagtcctccagcccacgtttggtgggtgagggtcagagtgctgccttgttggtgacgtcagggaccaaggcaagggagaggagctgagtggggaaggagatcccctgcccccagaggccttgtatagcagcacagtttgctattttgagaagctagtcacagctgtctgtgaaaaatgaatttgttaggaaaaggaaacaaagcttactttataaaaattatatatcccttccccaaaagggaggatccaggattgaggggtccgaagcatatacaatttgaagactctcttatttttttaaaaatataaaattaggcatacaatagaatgtattttttggactaaggaaaaaaattcaataaattagaatttttttaaaggctggtcaatactacaagcatacaaactttagaaaagataatgtaatattttaattaactgcctgacacgtctctataacaccttttgtttcctccatgtccttgacttcactgtgtttgactacatcttagttcaacaatatttaataatatatttgtctatatatagaaaaagagactattcattccttcctctaggttcacacttcattattaataatatcatgtacatttttagaatccttgtcaaatttgggaggggaagataaagtagaacagagtgagcttccctggctgtgactaaaatatcttttgcaatctgtacaaaacctaaggccgtgcagtcacattgctgggctcctcttggtctggaggaggctgtgatcaactcctctctgaccctcatccacttggttcacacaatgtggtttattgccattgtgcacagccaattctcccacacacatcgctctgctaaaatgtaatgggatgtggccttcatttcatcttataaatgatcttagaatggaaatgctctaaaaagtccatgccaggcaaaattttaaagatggaagtattgtttctttgtattaagtgtattgtttttggctaagagtccttgtaaatcttacaaagccaagaacaatttcaaggtgacctttaagacacataagtggctgctctccaaatagctcgattaatgttaaaaataaaaggtagtatttcagatttgtggatggagtcgtccaaccagtaagtcaccaatgctattttaactacagtttctaccttctgactttagaaaaaaaagttacaaaaacagtcattcattcaacaaaataggcatgttttcaaccagacatgcagcaggcattgtgataggacttggctactgtgaggaataagtcagaccttagtccctgccctcaccggactttgactgcagggggaagatgacaaacgcaagctgatgtgctgcaaagtctgcaatgcatggcagtaggtcccctccaccacgacactgggcctacgcagcatgatcttgattttgttttcatttacttgtttatagtccccacccccacttgtgctggatgcacaagggcagagatggggctgttgccttcacgagtgcaacccagcacctagaacatggtcttggtgggaaaaatctctctgggtaaaggaacattctggctgctaacttgaatggtggccactacttggataggaggagggacaacatggttcatcgggcctgtctcaggtgcccaggctggactatcatctagtgtgtcgctaactataggaactgggaagtggccttcagagcaagtgggctgactggatttggcagagcttgacacctcaccaggcagatgcaacaaaagagcagggcagacccagccatcccattactgggtatatacccaaaggactataaatcatgctgctataaagacacatgcacacgtatgtttattgcggcactattcacaatagcaaagacttggaaccaacccagatgtccaacaatgatagactggattaagaaaatgtggcacatatacaccatggaatactatgcagccataaaaagtgatgagttcatgtcctttgtagggacacggatgaaattggaaatcatcattctcagtaaactatcgcaaggacaaaaaaacaaacaccgcatgttctcactcataggtgggaactgaacattgagaacacatggacacaggaaggggaacatcacactctggggactgttgtggggtgggaggagcggggagggatagctttaggagatatacctaatgctaaatgacaagttaatgggtgcagcacaccagcatggcacatgtatacatatgtaactaacctgcacattgtgcacatgtaccctaaaacttaaagtataataataataaaataaaataaaataaaaaagaaaaaaaagagagcagggcagcaagagattcacggggtagcatgggtatggtggccagggcaggcctggatgcctgcaggagagggagggaagtgaagcggtggatgccgagtgggtgtgcaggagcccgggcatctacagaaccccagtccgagccccaggaggcagcaccatgtcatggtcacgtggtgccctgagaccattttggtgccctgagattctatggatggtggcagagttttccttgatggtggcagactggccgggtggtggagggattggcacgtggctgccccaggccacaccatgaggtgttgagagagatcctggctgctcagctgccccgagtgtgcagcatggagcaggggcggctgctctgacggctcacagcaggagaggcacctggagagctgggctgtgatcaggcccagtagtttgcagatgtctggagagaaactgagtcagagaggaagcccaggaggttgtgagcctcagcgatctgagaggcatgcatgttgaagagtgagtgaggaggatgggaagcctgcaggcttggtgggtcctaaagttgcaagaacatcactgtcccctgcagctaagtgggcctgatgtactccactcaggccacagttgctgtacatgatctcttgggaccctagaagtgctcctttccatgatagctctttaatacattagttaaaacgattcccaggaagcccttgttccaagtatgcaggatcagataaaaagcgcagaaaccctcagagcagggaccgacggtgagtgcagtttgccctcagaggccttggtagtcaccccttcccaacccccatgccaccactgaatccccatgtggcttgttcttatatgccctgcagctgaaattcaggtgccctcctgaccttccttcccctgtccattttgaaaagaaataagcagtgtaatctttgagtcatcccttttgtactagccaagttccaggtgcagcatgacacactcgttatctccacctctcttctccccttcctttccctcatgtctgcacacactcccatcccctcacttcttccccctacagcccgcctctctctctctcacacacacacatacatacacacacacacacacacacacacacacttgagaaccgcggctgcatatcatctcctgtggacctgtgcacaacctgtggggcccaacttaaagtactgcatccattctccgtggtttatcctaatttaggtttgtttcctggtcatatagaatactgaagtatatgtctttaggaactgtctcaatttcttagagaaatgggatatacgtgaataaaatttttatgattcccttatactgagtcccacttgcactgcaaaggattaataacatctgtttccaaagcaaggcgtcacctgccatgcaagccacctgctggggaggggaggtgaagggtgtgagcattggtgagaggtgttgttctcatgttcaaggtgacaggtatgttatctggtgtccccaggctgggtcccacccagggcctgctcctggacgagggctgtatggctctgatttgcacacccctgattctggtggacacaaccctttttcttagaaagccagaatcactgtatcttctagtccttagctgcataaaaaaatggggtgcaaaacttctctggactgtctattcttattgttcattggtttatcctgcagggccacccatggagcccgtaacttaagatgcacaaatgagctattgagtgaatatgtgtgtgtgtgtgtgtgtgtgggtgtgtgtgagagagagagagagagagagacagacagagaaaaagaaagaaccatctggagggctggcaaaagcacagatgtctgcgttccatcccctgagtttttaattcacaggtctgtgtaaggactcttccatttgcattcctgccaagttctcaaatgatgctgatgctgctggtctggggatatggtgtgagcctgtttgagatacctgttacctacctgggctggattaacaactatgatcatttgagattttcatagttcattggagggtctgtaactgcatttgcagttgcaattcctgcaaaatgcccaaatactgtattattggactggttccgataaagttatctttgaaaatgcctctatttctagaaacttaagttagatagtaaagaaattcaggccatgagtcagacaggccctgccacttaatagctctgtgatttggacaacttaattttgctctctgagcctctgtttcctcagtaataaaatggggagactgatgttttatctgagtcattatggagatgacttaagtaatgtgtataaagctaagccaatggttctcatgtctctgtggttcctacatccatgaattcttttctttcatcagttctgaaaaacatcttgctacttttttcttcaaatattgctctctgttgttcttgcccatttcttccttcagagactcctattaaatacagtttgaccttctcaattcatcctttatattttttattttcccttgccttttctgtgtcctgtgctatgagtaacgtcgttgaattattcttccagcgcactaatttttccttcatttgtgtccaatctgctcttacgctcattcactgattttttttaattacattttttagaaaatttctagcagttctgtttgtttgtttgtttgtttgttttttcaaatatttctggggcatttttagagtatcttattggttgctaatttccatggttccgttttttattttgttaaacatttcatagtttatattctatatctgattattctactaccgaaacttttggaggatgtaaatctctctctctttccctccctaccccttttctcataactcatgcttccttatgttttcagtgatctttctgagcttatgcctgattgatattaatctgtgggaatcctgagtattcgatgctgggaacactttcctccagagttgaaggggatttcctcttcacaggtccttgctttaaggtgggaatcccacatccaggtgctcactgggctgctggcctgagattctgtccctgtccacagctgtgctgatattggcattggccctttggccaaacccactttaattgctctcatttgccactcactttttgctgttcaagtttcaactcactttttgtcctatacttcaatttcaaaagtgaatttgcggcttaggaaaaaccttttccttgttcattgaggaatgagactgtgttaggctgtcacgagcctcctttgccacaacaaaaactctgttccatcagtgctttcatatgctgccgtaattgatcaaagtatgccattttatttgacacatgtggttttgcagacctaggtcatcataaagagtcatgacctgtctgaagttaaaacttcaaagagagttgtgggctgatgtcaatatcacttcattgatgctgatcaaagtctccttgaagctgaaagacaagatgcgttaaataattccaccttcatgaactaaagcagagggagagaatgagagggcgtttgtaataaaatgttttaaacgacaggtgtgttaaaacagcttggtgtggcctcagatagggattgtgtactgatcttgctcttctttgtgtggaatgcacatgtgcctcagtagtgctatggcgcaaggcagaagcactcagaagttgcattatctatatctttcatggatcagtaaagctggcatttctcctgcctcttgctgacatacacactgttcaggacctcattcgctcccacatcctcctcttcccctctcccagctctctttgagaaaccactgttgggagatggctctgagtgagaactgcccacccaacccagcacaggccccctctgtccatctgcccagcccaccttagccacagtgagcattcatcctttgcacatctaatgcacacagccaatcccaggcatcttccttccccttgtatgagtctgacaactgacccggtgatactctactctgccatggaaaaaaaatggcaggggagaatgagaacacctagtgggctggaatgtgcccggcttttctgttccgtctacagcagatacaggcagtgtccccgtagccctggggaggccaccttgagtgcctcactacttcttacatcctcactttccccttggtgcccgggcatcacctctgtatattctctctcccctaggagggtgcaggagagtagaggagtccagcccttccaggccatgccccagcagagtcaacatgcctcacctttggatagtgttctagtgtctgtgaggcacaaggcctgctcaccccagaggccaaggctgcctaccctgggaaagtagacatgccgcaggtcaaggactgtctcaagaccagttaggacagcttctcagcatcatctcaagctcaagccctggaaatctcaggctttgcaatagcaaaacacaaatctgttaacttactcctcccaagacaattactgggaaaaaatattttgtaaatattcaaaggcttctgtgaacagcctgaggccagatgaccctgaaggcggaaggcagcaagccagacaggagccaggagccttgcctgtgtgcacgccctctctgggtgtctgtagagccataagcctgggtgggtgtcctgatgccaccaccagggcaaagctctcagtaagaggacacagccaagaggaggagcaagccttccaaatcagtttgtctcctatgtttaattaaaaatagcctggtccaggatctgcctgcagccaacagatacctcacagttgctggtggttaatgtcgcgagccttctggtctttgccacctacagatgctgggcctgtgggtttcctttctctgctcttgtttcctgccacctgccacagggggctgcccaggccacatgtccatggtcactacctataccttccagttacctgttgccaggactggccagggctgcttggtggagcacaggaagagaggggatcgcctgcagaacctgtcctcttgaagagcctcaaggaagtgaggcctttgcagaaactgcttgttccaaagcaaagggcactctctgtttcctctgggttgctctctatttcctcctggtaccagctctctttttatactgcttttattgtgaaatataaaacaaacacataagagtgcataactaaataggtacaacttaatgaatgattatcaagcaaacacaacccagtcaagaaatgaaatgcacccagcattgcaggagaccactccgccctcacacactcatacccatctgtacagctggcctcctgggaggcaccacctcctgaactcttgtgttcatcacgcccttgctttttttgttatttttcatttgtttgtttttttagttttaccacctaggtgtacatcactagataaaacaggtggcttttgtctgtttggggactttgtgtatatggtagcatggagtgagttttatgtttgtgagactcatctgtgctttgtatagctaccatttgctcattttattgctttagaatacagtattgtgtgaattcctacaatttacttgctctgtggtcacttacgttgtgtgcagtttttgataagcacagatgaagctgctataagtagccttggggtgcatagtgcacacatttcatacacctaggggtggaattgctcattcacgaggtctgtgaatgaataagttcagtttcaggagactgttccaaattgttttccaaagtgggtgagcccatttatgctcccacaagcaacgtaggaggggccttgctgctccccactctcagtagcacttagaatgatctttctaacttccaccagtctgaagagcgtggaatggtacttccctggggtcttcattcatgtttgccagatgcctaatgaggttgatggcatcatctctcagggaaacctgtgcttgtctgtctcagtttttaacaagaaaatgtcaatcaagacatagggtaagatggagtacagcagattggacatggattcagaaaccagagttcagatcccatttattactactatctttttttctggagagatggcgtctcactctgttgcccaggctggagtgccatggtgcagtcttggctcactgcagctttcacctcctgggctcaagtaatcctcctgccttggcctcccaaagtgctaggattacagatgtgtgccactgcacctggttcagatcccatgtattatctccatgaccttgaggtcacagacgtaaaagattaaattataggaaatactttggagtgacatattgtcaccattctttcaaggccaacttttataggcatatgcatccactcttactgctgtagtatttggatagctctctataccctcaaactataagccactgatatgtatagaataaacataaatagtctcactttataagatactttccctataaaacagactcagttctctctttatatgaaaagattaccatgtggttttttgttgtgttgtgttgtgttgtatttaacagtcaccaactgctggctgtagtcggccatgtggctgtgaaaagggagctcacaccttgggcgctggcaactcggttggtttgggaggaagaggttgttctcacagtggggaggtttcagcacagccacctgctgaggccacagagaacctagatatgtgtcctgtaccctggccagctgccctgagctgtggggtgctgtgcatggccaagcaccgctagaaaagacacttattctgaatttcactcctcccatgccatcgttcagctttcaagtcttgggttagctttttgagataagtctccatggcaagggacaggaaagcatggccatgtccagttctgaaggccatctcaactctccctgtggtcgtgtatctgacttcttgcaaccaggaggaggcatcagaaatttccccagtacccagacgtcccaaggcagttgggcacacttgaactctgccccaagtacagtgcatttgggcacgtggcttaacaattttggacctcagcttcctcattttagaaaatgcaggggccaaagaggcttcctgggacttcatgactcaccctcagaacctaagatctcatgaaccaaagggctgcagctgtggagaggggagaatggggcagtgtgtgtgactacgaagctaaactgggggattcgcacccatttcgtgccttttcagcctccactgggacctcgaactccccaagtcccacaggtcttccaggggatctctcacctccccatgagtcataagccttacgtggcatgcactgcagtgggggtgttgttccctgcctggcatcagactcctgtgtttctgttcaccaggacccagggcagggggttgttctgagggtcgcccagcattaccatgaagacagagccttggctgctcagcacggccagcacagctctggtttcacctctgtctcttcaccccacagtggatgtcattttcttctcctgggggtgttacccgacaatatcatcatttgaaactgtttgaagtccagccctgcctccctttcctgcattgggagcttggaagtccagccctgcctccctttcctgcagtgggagagtggaagtccagccctgcctccctttcctgcagtgggagcatgggagggactgaggaaggcccgggggatggaggcttccataaccctccatctctggtccagaagatggctggttaaaatgcccaccaaacacccccacccacactccaagctaggtggtagagctgtccatcttggatctaacccaaatgcaggccctggtgaagaaaggtgagtccacagtgctccacagataatcagggcccgtggtgcccctgtgctcatcaccctgagaagcgtcactgctactgagcaccaggctctcctgaccactgcccagagctcctgggccctgctagagcttagccatggtccattcatcaccaacctgctagcatttccttgttgcaagcttgcccactggcatcatccctgagtggtaaactgggccttcctgggttgggtaaagcccttgaccctgaggctccaaactctgccctccagctgccttgccaggtgacaggccccagagagcggctgctgaccattcaggccagggtgcttcctcccagggtcccacctggagactggcgggcctggggatgatgcagttccatcctctcttctaggatccgagccagagacaacaacggctcctacgccctgtgcctgctgcacgaagggaaggtgctgcactatcgcatcgacaaagacaagacagggaagctctccatccccgagggaaagaagttcgacacgctctggcaggtacccagcctcctctccccaccttgtgggtagagtacagggcacgtggggctccttgtcccatggactcttagacatgagaggaactggaccacccactgcccacagtgtggtccccaggccagcagcagctctggagctcatgagaaacacacacctggaccacacctgggctcctgccccacctgcccatcagaccccactttcagcctccaggtggcttctgtgtttgagaagcactggtccagaggccgtcatgtgaggtgaacgaaggttccatggcttgttcagggccactcagccctcagtgccacaaggtgatgtaagtgcagggctgtgttcagagtttaacaagacactctctttggagatctagaaaatatttcttcctaggatattctaactagagcccagaacagcctttcagacaaagacacacaaaataaaggaatggatgcctggggaaggaggcctaggaacagccaagcaggactttgttggtggtgtgagaggctgaattagacagcaaatgtcaggtgccctcctcattgtaaatcgagtctctctctgtggaaactaaggcaatttaggaagcatactccctgggctccaggctgctgcttatgctgattgccacagccctggtctaaaaagtgcttattcctgacccagctactagaaaaccctgaaacaactcccaatttggaagttccttaggcactaatgagcactaaaataatgctcatcactgctttccctgaatcgcagtgagcacagattgcttgtcttaattttgcatcacagctacactggctgatgatgaaggaaataaccgtaacagtacttcgtgcatcatcttcgcagagcatcctataaactgtagtaggttcagaaacagggagaaagccaaccgactctgccaccaccccaccgccccagagcaccagctaccttgaacatgtgtgggtgaggggcataatcagggcgtgttccaatgtcctcacccaagcccagctggggccacacatgcagtcaatgttgaggaaaggactcaactcaaaatcctgtcttttcaaaaactgagactacagagccttagcccctttaaagcacttaaacttactacttccaaatgtgatttgctttctagtgctgtaattggaaaaaaaaaatactccttttttgaatgctggatatgatcatattaaaaaatgttagtcacaacatttacattgtcttttgattttgtggctcattgccatttgtcatcattaaccacaggcttctttcttttaacgatattgattcgaaagagtatttaacctttctacactcaaagccccaaagcacatcagggaggtgagtagggaatgtggccttctggaatgcaaaggcacctggagtcctctatgccagcttaatgctccaaggtcccaggccccatcacttataaacagccattcattcaccttctcctgaaagggcattttatgtgtgtggcgttctgtcaccatttcaaaggctgagcactcaccatagtgttaagcatctctaattattgagaatgtccttcccaagaatctttactatttgtattgattcccctggtagatcatagcattcatccctaattaaatattcctcattgtatattttctaggcactgtgtttaggaaactacgtcaaaaatgccagcaatacgttccaatttcccatgcatgatttcattgatttttcttgacagcgttctaaggtacttctgtaccctacccaactccagggccccagtgctatttcacggagagttggtgattgccataataccctatttcaatattctttactgtagaccagggatctgcaaacccacagaccaactctggctctcagcctgtttctgtgtagtccctgaagagaatggtttgtatgctgttaaaggtgttgttttggataaataaataaataaacaaaggacacagatacggtatgaggcccacaaaagcctaaaataccactttctggccctttacagaaaaaatttgctgcccctagcccaagaggggggatccctagctgtgggcccacttccccagccacccttgtggagtggacttaagcacataaaagcatttatgtgtcttggggccacttcgaaagcccaacagtcagtcagtagctctcagtcactatttgtctatttcctgaccttggtatttaccactttcttacttttttctctttcagctagtcgagcattattcttataaagcagatggtttgttaagagttcttactgtcccatgtcaaaaaatcggcacacagggtgagttcccaagacactggagtctcagtgtttgaggtatcagtgacaatcagcctcattttagacttagctgattgcagatttgggttggatgaggacttctttttacgggttgattaataatgatatcagagcactccgattttgtatatcgtgaatcaaaaaatagccagttgctttaactttaaaaaaattgtaatttatttgtcttcattgcatgcgggaaaaagtaaaagagggtcgaaagaagtacctgcagaaagcgtgctcacttctcaagcagcagcacatcctgatctcattgattgatctgcagtggggaggggaaggaagtggtttcctcagatagagcagtaattgtccatgctctctctaaccaggaaatgttaattttggaggccgtccacaacttccaggttcccatcctgcggtaagtgtcactaggaataccactgaatgagaagctgttgcatatttcacaaatgaaaagcatgttttagctaacaggagtagtaggcattgatattttgattgcgcttcaaaacatactccgtgatgagctgggattgctagtgagtgttaggcagaatcagcctcctattagtgataaactaaccacattttcttttctttttttcttttgctttttttttttggagatggagtgtctcactctgtcaccctgactggagtgcactggtgcaatcacggctcactgcaacctctgcctcccagcttcaagccattctcatgcctcagcctcccgagtagctgggattacaggtgcctgccatcacacccggctaatttttgtattttttagtagagacgaggttttgccattttggtcaggctggtctcaaattcctggcctcaagttatcctcctgcttcgacctcccaaagtgcttggattacaggcatgagccaccacactctgcctagccacattttcttaacttcttgtctagatgaaattctcttcatttttggagaatatacacaatgcgaatgaaacccaatattaaatcagaagtaggcctcttgcaatatttgagaaatgggaacatattttttagcttcatccttgagccgtctatgttaacacacgtaattcacaggacctcagctgtctcctccctccagcctgttaggaggtcaggtacagatttatgctctaagcaggaattattttcctgctcttttcttggggctacatatggccttttttttttttttttttttttttttttgagacggagtctcgctctgttgcccaggctggagtgcagtggcgcgatctcagctcactgcaagctccgcctcccgggttcacgccattctcctgcctcagcctcgcgagtagctgggactacaggcgcccgccacaacgcccggctaatttttttatatttttagtagagatggggtttcaccccgttagccaggatggtctcgatctcctaacctcgtgatctgcccgcctcggcctcccaaagtgctgggattacaggcgtgagccaccgtgcccggcccatatggactttttatgccctttaatgccatctgtgaagtgcgccctctgcacctcactttttgcctggtaacccttgaaaaacaaaatctgcagaaagccaaatatacatcctgcctccagtagggacaattggctgcccagtagctgagcccaggttgaaacaggggaggctgtccaggggcagcacttgttatcaaatgcagggaacgtgaatttgctaaaataccagtgacctttgggatcaaaatgtaatgcctttatggaagtgtgactttattttgccctttacagggctcacaggcctggcaactctatcttaatattataggctcggtgagacagatccatacacccttcagatggatgagggcttagggctgagaactcttaaaagaatgtcaagccctgtgcttagccatcatcacccaatgactacaagaagttagatattttggaataactttttaattgactggtaagatacatacgggaaaaaaaaggcatacgccctatgtgtacaactcaattaatttccacaaaattttccaccgtggaaccagcacccaccatgaagaagcaacacaactgagcactcagatctacttgtagtttctttcggtggtttgtcttgagcttacaacttaataattccacgtgaagcatgagctagtgaatgtaacagctctaattttgtagccttcagtggaacatatttcccaaatatatttctagatccttcttcccaagtggcaggcccttccagaagccttcccaatgatcaggtgttgcccgtggtcgatctcattggcagggacaggagggggttagtggtgcgattatagaagcaaatttaagtagcatgtcatggaagggatcctgtatttgttttctgaaacatttactgttcctctttgccgttgtggtttctagacttggtcagcgggtggaataatctcaagaatcaaatcatactccttcccaaagcctggccacagaaaggtgctaaagcaacccctgcttgctgtccaactaagtggtaggaccaacgcgcactcagctcccgcccgcccagtctgccctgtgtgtgcgctgccccccatctcttgccactctgcttccaggcctctttgcccttgctcacacctgctgttcctgggcagccgcgccccaggtacatcatgtgcttttcatgtgggtcctcagtccgtcagctggaagtccaacagtgtgagcatgctttctgtgctcaagcgtcattttaaagtcgtttcagttggcgtcatccgtcatagctaattatcatgtcggaaaatcttttcaaagatggcccacttactttttggtggccagactcacgtgttgcagtgttctggtaattgattatgtaagttacgttgtgatggagggaacaccaaggttttgtgaggcgcgctgcacagtgaggtcaggcagtgcatggtaacttcattatggcttagacgtctaacatagaactgcaaatgtgacatgtaaagaagaggtgtaatctgaggtctagaaaaaccagttttctttttgaggcagtaatgttgacatctcattgatttccatgttttgttctattattggattttgagggaaaataaaaataagttctttttcatgacttttatttataatgacttatttattccttcccccaaaatatgtatatataatgtgtttgaattgctttttttccattctacttttattatcagtggggtaaaattggttcttttatcagtaattctttttattttcatattacttggtgtttttaccgacattttagcatataattgagcatccactcatgaaatagattgcctaaagtatttactagaaacaacagaaataaaagacataaaacccttgagattttatttagtaataattttccaagtttactcatactcaagaagttctcaatcgtgttgaccatagaacagaaagatttaatgcagtgttcgagaggaagaaaaggtttattttacacttgaataaagtaactatgtctgtttttcatgtttacccaaggcaaaacacccccacagattactcacagtggctaaagaaatacctagaaaataagttttggtgcatctttagactacaggagaacatgtcagaaaaaagttgaagaaaatatcagtgaccacctaaaaataaagaagtatatgtgtagataacaaccataacatcatcaaaagagaaatgagaaactgggagtaagtagcactaatgctgacacatagattaatagctttagtatacaaagagattctaaaaataattaacaaaaatattaactgtctactaggataattggcagggaatatcagtagtagtttatagtaaagcaaatataaatagttcttaaacatatgaaatgttgtttaacttcatgagaagagaaatgcaagttaaaactatggtgcttaactgtgtccacctatgatccaaattttaaaagcttgataacactgtagtaaaggcatggtagataagcactttcactcttccttggggaagtctgaaatgatgcaatctgtaagaaaggctctgcaattttatttctaagtatgtacagatattcttgcatttgtgtgaaatcatgtacatgtgaaggtgttttttccaaaattgtataattgacaaagtctgataataatttaaatgcctatcaatggaaaacaaatgaaattggttacagtaaaattgctactatgggaggcagctgagatctagaattgttttcaaaatataattttaagtgtaaaagtcaatgtcctgcaacacacacatacacatacatatatgcagaatgtgttgatatcgtatacagtatcctagaaaaatacagaaaatgctggcaatgctggttgcctctggagtaagagatgggaatgttaagaaatcccacttttcattgtaaactctgttgtatctttttaaatttgaacctgttaagaaattttaatcaatttttttaaaacagaaaattaaatagtagagagtaattaatctgattaatattgtgaaaatacctttctggcaaaaaaaaaagtttgctttctatttaagtttagaagaactttaaagtatacattgaattttttatagaaataagaaactggaaataaatattactaatgatgacacatatataaggccaaaaatatcaacagataatttttaaaagatcaaggttgtaaggtttaagctatagattaaaaatattttaattgcttatcagaaatattttagagctaatatgtatattttcacaaacaaatggggaactttccattatgtaatcagtcatgagaaaagaattgtgagaattatgtcaaatgtcccatcatgttagctaagagataaataactttcttgaacttgttaatttgctcagtgtacatagttgttttaataattcaggcacaaaaaatacatgttagaacttgaactacctatagcatctagatagttaatgaaaagtatgtttagatttgaagatgattatgaatcagataatttaaatttttcataaaattactaacaggctgatgcattttaaacttgtctttagaaattagtagcttactgccaagcacagtggctcatgcctataatcccagcactttgggaggccgaggcaggtggatcacttgaggtcaggagttcaagactagcctggccaatatggtgaaaactcatctctattaaaaatacaaaaattagccaggcgtggtggcacacgcctataatcccagctactcaggaggctgaagcaggaaaatcacttaagcctgggaggtggagattgcagagatcgtgccattgccctccagcctgggagacagagcaagactctgtctcaaaaacaaaaaaagaaaagaaaagaaaagaaattagtaacatacttataaagtataaacaaaattaacttaagaatacaactagtagtctttaaatgaattaaacccctcccaatattagtcctggaatttctttctctgctgctttaagcacagaaccttatccttcttttatggaaaataggtggaaattaaacagcaacatctctaaaaagacttccagggaacttttcagctttgcatttcaaaggcacatcccctaagaggattaaactgaaatgtgtcccagaatttccaattaaaacccatttttcatgttttattccaacacatacattggtgattataatattttaaaacttacatttaagtacagggctcagtgggaagagaaaaaagaaagaaacatcctcaagttgtaccctgttgcttggtaatgccttagtagaccagacccttgagaaaatgtgttttcatataattataaaggaacagattttagatcttcactgtaagagaacagtaattgcagaggtcaagtgttattttcatggatctcagagcaaagctaatagtagcctattccccagccaacagtctgccctcgcctgtgggggtctactgaaccagggtaattccaccaaaaaaaggaaaccaaacctagtttattgcagccaatatttctaaagccagctggctcttttgtcactattattgtgatgactaatgactgtattgtcatctgcattactgctgttgcctaatttgaaaatggcccaagaatctgggagtaaaaattaagatctagtaaatggatgttaggacacttggcaatactctggaatcaggaaactctgaatggacctatcagttccacagaccaataattttttcctcttttgttcacttttggatcaccagcttttaaacataggcactcaaagaatgcttgtcaaatacattttctattcgcagttaaaccttaccaataggaaatcagggataataatttataactggacttattattgcagagtgatatccttacctgaatttataaaatttaaagaaaagtcaccagttgttcttttggaaggtagaaagcgaaggtggctaatgccatctagcggtggactgaaggtttgagcctgttctgagtattagcaaaaatgaagaaagtggaatggtcaacatttcatttacaccttgttgctcactgtgcagaacagatgacacttattgattgggacagaatggctctctcaaatgcaaacataaagaataaaaggttaatagtaatgtagaccggaaatatattttttattaaaattaaatgtcattacattttttaagaatagtatttttacaatttatcattatgccactgtgctcattctttacaaactcctcaaatttttctttttaactgagcattttcttttagagattgttttggttattgttctactaagtggcatattcaccaagtgctttgggaaagatgaagcatggattttgcatcttcatctttatcataaagtaactactgttcttttaactgactcaataggaaacctcccatttcttccacattcttccagttgtggcatcattctttgctccagtcctgttagtcaccagaaagagataggggcagggagcccagggatctgggtaggagagagttgatgtggggttgttgagagacatgagggttctttgtggcttggcttaaaaggcttataatcacatagtggtctgtgttgggcagcatggaaatgaagccccaagctttattggctataaacgtggagttctaatttccgaggaagatctcccatctgtttccctatccataagccaagatagactaggggtgaacaacacactgctagtgagagtataaattatttgtgcccaggggtttagattctctgtgtccatcgctactaattcttactcattcctgacaccctagtatccctttcagcatattttgacaaccccatctctgttttaaaattcttccctgcaggattcatatgtcagggaattgcgttctggtttaattggaacaagccatttggaagtcctcctggtctggagaacattctgtgaggtagagaggctgcaaccccaggataatgtcctcagtgggagggacaggaggtcttatgtcaagaagaggtgatggtccctctcctcaccagtgatggctagtccgaggacatcctttaattccacatctgttcaagttttgtctttggatctcagaatgtgcctgcctgcagggaaaatcaaaggagttgaaatgacagtaaatattaaccttgaaagagactttaaaaaaaataaaactattttcagcctagaattggttgcgggagaaaactgggcaaaagaggaggacagaaagcctaggggatcacccagtttctgtcaggacagttttccagaggcaggataattatattataaatcagaagtgaaaccacagcacagtcctgtaatcatatgtaaatgtttaaaagaaatagattgtcatttggaattattcattcttatttctcttcatcagcataaaggcttgagagagagctaatttttaaagcacattagattatacttcacatctcctagtttttagaagtgattttcattcattcacccatccattcattcatgtgtttgttcaacacatttttattgagcgtccttgtggacgtggcacagttccgagtgcagtgaataaatgtctccccctccttgagcttatattctatttttatttttgatgtgtcatagttacttctgttaatcagttcagtagaagtgctgagatactctgtgacaaaacagatcccatcgacatcatttttacaaataagaccagatgtcctttagccttgtcaacaggcttgggccatggtgaacaatgtctgcctctgaagtgctcagcagaccgtgtgaaagaagaaggtccgggtgtttggaaacaatggctgagtggcggtagtggtgcattgtgacctcattattctgcttttggtttctcgccttgtaatatgaataaggcacatgaggatttagtgtgtgtcataagataagtgactgtcacgttaagcttaatgtctctgtttctgtaactttctccataatctggcagtatctcatttcttcgtggccagtgtttgggcactgaaaaggtcaatcaatacatagaattgtgactcaactcacgctgaaaaaaaaaaaaaagcatctgaatcatggttctcctgtgaattaaatttagtagcaagaatcttgttttaatttggaagaaagggtgggtcaggaaaactcaagatagagactttcaaaagggaaagtccttaggataatgagtagatttccccccccagttgtttcatgatataaactgatgtggaccaaataaatacctgtctcacaggggtactgatttccagcattagctgtggcagctggagcattgctggcctaggtggcagcaactggccttcccttgggacctgtagttactgaccagtgccaccctctgccatccaccccaatgctgctgcatctccaccgaagataaagacttgggtggagacttggaaaacatatgtgcgttggagttgggaagtaggtaggagcagctgatgagtactaattttcctctttaaataatgtccatgtaatatgaaattgaagagcacaagttaaagaaggaaaatgcttccaaggcgaacatgcaaatcatcagcgatctttggtaggtgggaataggatgtgcaagggggtgagtggggaagcagctctatccaggccagtagagttgactctcaccacaccctctgaacacctcacagagtcccttgagttgtagcagcacaagcttgctttagcccttgcaagatccaaataattgcccgaagaatgagatcagccttattttcttccctgtttttcgtaattctttcctttgtctttcctgcaaaagttaaactgtgattattggaaaataaaaataattatgcagatcaacttaacagttttgtggatgaagaaaaacaacctgttgtcctttatgtactttagtcctcccctgcccaagggaaccggcaagagagtactgtgtcattcaatccgtatgagccagaacttgcaccctgggctgcagacaaaggtgagacttcctttcattcaagggacattcacagagcaaagtgcgtggtcacttgtaagtttgtagagttggttcacgaatccacaccacgtccgtgattgcaatacagccacagttagccatggaaacactcacatctagtggcaggcagcaggcaccacatgcccatgagcagtgatggtgctattgaatgaaatggtctttcccacctccctcacccaacgacgttggaaatgtccctgccactcttcagaatttctcatcccttgcaacattgatgctactctgagttcatattcccatgaagatcatgttcttggaaggatgaatcctggtgtggggtccagccccaggtcgtatgtttcttgactgcattgcaggcccccagagagaagccctacccatggacacagaggtgtacgagagcccctacgcggaccccgaggagatcaggcccaaggaggtttacctggaccgaaagctgctgacgctggaagacaaagaactgggctctggtaattttggaactgtgaaaaagggctactaccaaatgaaaaagtaagttgctatgttccaccagcctcaccctcacatgagctcaggttctagacatgactgagaataacaaaatgtaacctggcatgactaaaccctttttttattaatgctaccattcttgttaatttctggtactattataatgaaagcgtccattacctttaatggcaaaaactgcaattacttttgcaccaacctaatagtacatgcaccttatggaaaattaggaaatagaaacaagcagaaacataagaaaataaaaacatcaaattggcatggtggctcatgcctgtaatcttagcaatttgggaggctgggataggaggattgtttgaggcctggagcttgagaccagcctgggcaacatagcaagaccctgtctctacaaaaaaaataaataaataaataaataaataaaacataaaaaattagccagacatagtagtgcacacatatacttccagctgctcaagaggccaagaagccaaggctgcagtgagccatgattgcaccactgcactctagcctgggtaacaaagcaaggccctgtttcaaaaaacaaaacaaaaaaaagaaaagaagaacatcatatttgtataataccatcccaacactactactgttaactaaacattactactgttaacttaatcttattgtatatatttttagatctttatttgtacacacagatattatttaattaaaacaaaatcattccattataacaatagtttttacatttattttctttaattttatagttacatctcatttttcttacatgaaaattattgattccaaatatgattagtataattatttattggctttatcctatgatttcagataacaatacatattatacaacagttaaaattgctaaatttcgaaaatatctttgtatttcttttggtctttagaaggtacccaacatagaatgtacaagtaaaactactggtttctaaagtcctttgaaatacaccctctgtttgaattggtatgatactaatatgaatgtggttagatttagtagcttcatggtatttcaaatgtaagggatttttgtaaaaaaaaaattcgtgagtaggtaatttttatgattcaagggttaaaaatatagacaaaaatatacacagacatgcgtgctttccggccgggtgccgtggctcatgcctataatcccagcactttgggaggccaaggtaggtggatcacctgaggtctggagttcaagaccatcctggccaacatggtaaaacctcgtctccactaaaaatacaaaaaattagctgggtgtggtggcatacacctgtagtcccaactacttaggaggctgaggcaggagaatcacttgaacctgggaggaagaggttgcagccagccaagatcacaccattgcactccagcctgggcaacaagagtgaaactctgcctcaaaaaaaaaaaaaaaaaaagaaagaaagaaaaaagaaatgcttgctttccaatctgtcccttcgatttgtttttgtgcatgtgtgtgtgtgtaaattagatacacatacatgtatgtatacacacacaaacatacacacatatgtatacattcacaagtatatacatgcgcacatatatacacacacaatcaaaattggctgtgatacttattttaaaatatatgtttgtatatcacagtcattttgtacaatgagtaaaaatgtttctgtattaatcctaagctttttcagattatgaaaggttgtgatctttattctgtgcttaaatttgtgaattaacatagacatgactgtggacataatttcaactagagaatttggggagaggagaggctctctcggtcaatttggggcaaaatgatgtctttacaatactgagtctttcaatctataaacacagcccatctctccatttaccaggtcttcttcagcctctctcaggagagttgtttaccttttcaatgtattacattgaaatatatgcttttaaattctgcacctagaaattcactttcaacaattatgaaaggcattttatattcacattcattacatgtaatctgagatggtgaatcccaagatgttacaggaattcgtacatgtcatcgttggtgaagtttatttacaagttatttaaatattttacagtttagggtttttgcttggttgggacattcttcagtactgttcttcaccattctttttattttatattattttttagaaacagtgtttcactgtgtcacccaggctggagtgaagtggcaagaagctcactgcagccttgaactcctgagtccaagtgattctcccacctcagcctcccgagcagctgggactacaggcttgcactgtcacgcctgggtgattttttttagagatgggggtctcactatgttgcccaggctgaccttgaacttctgacctcaagcaatcctcccctttcaacctcccaaagtatggggattgtcagcatgagccaccatgcccagcccccaccattcttttttagtaatggagtattactctcattgtctataaaataagggaatataggttggaaggccagccatccattacaggcttctgaagacacattgccactctgtggcaggtatttccgtgggactgtttccacagggggattatgcttcacaggataagattatctagaagtgaggcattttggaaagtttcttgtgtgttatgatttctcttgcagagttgtgaaaaccgtggctgtgaaaatactgaaaaacgaggccaatgaccccgctcttaaagatgagttattagcagaagcaaatgtcatgcagcagctggacaacccgtacatcgtgcggatgatcgggatatgcgaggccgagtcctggatgctggttatggagatggcagaacttggtcccctcaataagtatttgcagcagaacaggtattgtcaggtgcccccacacatctggaagctatcccctaagggacagggcccacccctggatgggccgagcagcctgatttccttgggaagccttcccaccctcctgtgccttcctttattggtccatactcagggaccttgacagagggacagggagacatagtctttggattcagctctgttagctctagttgttcagagaagaactcatttgacagttttgtcttttttttcttcctgtagtcattcagtcttggcctagtgatagactcagcctcagaatatcttgacatggaatctcctttctcactgggaagaacactttctttttaaagaaacattttaaataaatgcttttctaagaggtgacagttaagtcttatctgtttggctgaccttatgttctcatgagtgatgacttctgaaaataccaatcactgctaattgattacatccatcaagggagtaattgtgttcttctcatctaaagctgttgttgagatgaagaaactcacttggagtaagacagaatgatggccaccgaggagcttgcctcatttgctgtgctacgtttgtacttagattgtctctttagtctccatggaagggaggtgttcttaccctgactttgtaggtgagaaactgattctcagggttagttctgtgacctgtgtgatactggaacaaggatttgaggtggtgcctggctatctgtgagccaggcctgactactctgttatactgcttttcttgcaattccaagcatgccaggaaactcaatcccattgaacaccaggagaatatggcattgagtcctgaagagctatatgctaacaaagttatttgtcaccactcgtgagttttgttgtttaagaagagggaaggagtagattcacccactgcctgcgtgaggagcatggttgtttgttgtgaaatgggtcactgtctgttatagctgatgagatcattatgactttcagacatgtcaaggataagaacatcatagaactggttcatcaggtttccatgggcatgaagtacttggaggagagcaattttgtgcacagagatctggctgcaagaaatgtgttgctagttacccaacattacgccaagatcagtgatttcggactttccaaagcactgcgtgctgatgaaaactactacaaggtaagtacaacttagctaatattcagagcagcaggtggtaaaaaatgcaagataaatgtacgttttctttattttattattggtatggtttcaaaaagcagttttgctactgaaaaataactatgtaagatatgttcttataatctttgattttactgtttaaaaaataaaaataatatcacaccttgagatttactcaaagtagtatattctaaattatgtttcatggaatgatcaggaatcgaggtattaagtgaagatttgttttgaaaaaagaagaatgggattccttcattaagttaatttgaaaagtttgcattggacagcttgattcttgcaggatttccccgaagcccttttcatgctacttaacattacgaatctcagtagagggtttactgcactgcatttctcaaaccagattcatccatggcatccttttctgataggacatttcataacatgtggtggaacactgtcccacagcatggagctattggagcttggagctccagtactgcagttcagagctccaatattgcagcttggagctattccaaaataactttctaatgaacacctacctatacatgcaaaagttagaaagtgaagatttaccaaataaactcgtcatctgtgtatgtccactacatatgtagaaattgttctattggcttaactggtatccagaagagttgaagtgtcaaaaaatagatgcagtgctggaaagaagagatctagatagttatgtgactgaagctaaaagaaatatgccccttggtttggtgaggcagagattatcaagaattaagggtggacttccagcaaaacataaagtagaaactagttctgggtgcaggtttggacttcctaaaaaataatttcacagtgaccaatccccttgctaatataacttgacccctctctgaaccctcaaatgaaccaataacaactaaaagaagaaaagataagaaagctctatcttcatattaactcatctgtggtgtatacctagggtctatgttaaccaactggaaaacgtgatggcaccaatcccactgagtcaaagagggtgccgaaggcaggttaacaaccctgctagtctctggtgaagtccacatgctcagaaatagatggcagaccttcaaaatctacctagtgggtggcagataggatcctgtgtttcatgccctgcagtggtcagagaccccaccctgagtgacaatacccacccactcacctttccctaagaggcagtccatggactggtaggtgatggggaatggtggacctcggccagcaaagggactgcatgaagggtaagccacaagagccaagctcccaggcaggcaggcagactccaccatcttgagcacaaaggccaggcgagagtacagcaggggtcaggctggccctcctcaccccattcttcatacagtagcttcccagaaggaagccccttcagaggtgaaccactgtgagaaaggcatcagcatgggcctggatagaaatagcagggaaacagagcaaggaagacagcagcctaggatgaccagcatgggacatgctggagaaagaagcctgttgtaatgctggatgtacctcatcatgatcattacagaaaagaagacagcctgtctgaaacaaggacacagaggagatagagaaaatgaaacatgaatgctgggcaccttatccactgctgtataacaaatcaccccaaacttactgccaaaaacaccaccaggtgttggtttccctgccgtcctgctgtgtgggcagggccaggtaggcagggttcagtgcgtctgctcacacaggggattgcacagtggcccgagggacaggaggaccgtttccactctgctcactcacactactcagccactgagcagctggttagacacagcccatgctggagacctctgcggggctgtcagccagctcacctgcacatggcctctccttggggcccttgggcttcccttgggcccatgcttcccttgggcagcatggcagctgcgggctgagagcagttacccaagaggcaggaagtgggggctgccaggcctataaaaccaggcccagaaactacctcagggtcacttccacctgatcctattggtcagagcagccaaggccaccagcttcaaaggatgggatagatagaaccacccttttgaggagaagtgtcaaagagtcaaagaacatggggccaattctaaaactgctgtagatattaaacagcataccattaaaaagtaaactaaactaaaaagtaaaccaaagattgtctttggacaatcaatgaagaaaaaaagccactagggaaataaaagccatcttggaagcagcaaaaagagacaaaactaccgaaaagatagggtagtggaagatttctgtatgaaaacaaagcaaagtgaaatggaaaagaataaaaagtgggccgggcgtggtggctcacgcctgtaatcccagcactttgggaggctgaggtgggtggattacctgaggtcaggagttcgagaccagcctggccaacatggtgaaatcccgtctctactaaaaacacaaaaattagccaggcatggtggcaggcacctgtaatcccagctactctggtggctgaggcaggagaattgcttgagcccgggaggtggaggttgcagtgagctgagatcgtgccactgcactctagcctggccaacagagcaagactctgtctcaaaaaaaaaaaaggaataaaaagtgaaacaagatcaaagaaaagtgctagctgtggaagcaaacgaacgctggcactcgggaaaccatgcgtgacagggtagatttgtgcagcatcacaactgaaaaacacaggtgttctttgatccagcagctccttccgagagcaaacacacacatctggtaatgtgcactctagcacgggctgccacggcaaaaatctggaaactgcctgacgactgctccgcagggtttggtccaatcagtcatagcagattcacaggaagctcacaatgcaacccttttaaaagtgacttatttgcatgtgctgacctagaaatatgtctactatacatggttaggtagaaaaattaaaaagtacagtgctcaaagaatatgcccctagttttatgaccagaaaaaagtatacactacctatttatgcatgtatctaggttattctgaagacagcctaaatttcattgcatttaagatttgtcaaaggtttacttttttcatcagttcaaaattcagaagaaacctgaaataacacacatggttgtattgttcatgacttgtaagatcaaaattttaaaatagcacacaaggtgatggaaacagaagtataatcagttgtatcatttggaagagaagtgccagggcaccttatggtctccagattgatgtcctgaatgtctccttgtgatccactgtagtgtcatgaaatcagttttcactgaaatcatgtccccctctccaccccaatgagacctcacacaggtgacatcagcagaagataaccagactccgctgtgtgccccctgaatcccaaacccagagagagggttttgctatgcagttttgacctctgtactatcacttgctttttaaaattaggaaattagaatgcttagatcattttttaatgatgctagcaagtagtgcatgctaaaataattgacctgggtggagaactgatcaagatggacgactaaatgcaactagtatatgctcctccgtagagacggaccaaaataacaagtacatattcacacttccaatagatggtctaagagagaacacagatgcaaccaaggagcgacaggaagcaccaaaagcaaagcacagggaaacaaggcagcctgcttggccaggaatgactgggagctgggagaagcttccagatatggggaaagcataaatgagagatccccagggctccacattccagccaaggacttctacaatcctagcgacagaagaacccctcgacccacgtgggccttaagactaacatagggagctgcctagggatcacacagaggcattgctccatagagggaactcacgctgagtcccacaggcttccaagctctgagtagctgcagcttggtgccatactgagaaccaagtccccaaaggactgcatcttgccctgggactattgctgatgctgccatcaccaggccaaggacagaggggagaatggacaccttcacacaccccagggacagatccccctgctgctacaggctgctgtggggctgagacacaagcaaatcacaccccctatagctgcctgcctacactgctccccctgagaatgtccgcagcctccccaggagcaggcccatagccagcgccattctgagagccaagcctccaaaggtctgtgtccttccttgggccagggctgatgctgccactgccccgccacatagggagaagggaggccaggcactttcacatgccacaaaaacaaataccaccaccactgctgagggctgctgtgggaccaaggctcaagaagactgcatatcccacagctacctgcctactctgcacctattgagagtggccctaccctttctggtggtaggccttcagggcagccactgctggcaacctagagaccacccctccctgcgtatcacagccagcagctgaatgcaccaccagggagcctgagcacaagtccattggcctagtcacatgccccaatacttgagcatgacatcctgttgcagccaccgccaacaccaacatggaccacttgggttccagtgagttgccctaccaccattactgccatcacccacatcacacccactccccaggaacccaagaacctgcccacatgcccagccactgcagcatccacacaatctacctgaaagcccaagggtcagccttcttagacctactaacaccagtgctagtgtataccgccctagggcccaaggacaggcatactcagctcactgctgtcaccactggggtctgaagactggcccacctagcatcctattcacagtacaccttcacaacagcctccactaataaccataccctaaggcactgagaaaatcacaggtgtcactgaggctgtttatggccatagaaattatacatagattaaatactgcattcaccccaaatcaaacccaaagtgccctacatatatatatgtgtgtgtgtatatatacacacatacacatacgtgtatatatacacacatacacatacgtgtatatatacacgcatatacacatacacatacgtgtatatatacacatacacatacacatacgtgtatatatacacacatatacacatacgtgtatatatacacacatatacacatacacatacgtgtatatatacacacatacacatacgtgtatacatacatacacacatacgtgtatatatgcatacatacacatatgtgtatatatacatacatatacacatatgtgtgtacatatacatacacatacacatatgtgtgtacatatacatacacacacatacacatatgtgtacatgtacatacatacacatacacatatgtgtacatgtacatacatacacatacacatatgtgtacatgtacatacatacacatacacatatgtgtacatgtacatatatacacatatacacatatgtgtacatgtacatatatacacatatacacatatgtgtacatgtacatatatacacatatacacatatgtgtacatgtacatatacacatatacacatatgtgtacatgtacatatacacatatacacatatgtgtacatgcacatatacacatgtgtacatgcacatatacacatatgtgtacatacacatatacacatatgtgtgtatatacatatacacacatatgtgtgtatatacatatatacatatatacatatatatacatatgcacatatgtgtatatatacatatatatacatatgcacatatgtgtatatatatacacacatatatgtgtatatatatatatacccaacatatatatacccaacaacatatatatattttcaggaaaaagacctcctctacaaaagcaatttcaaaaaactggaagaaatgactgttgtaccacatgggcagatatcaatgtaagaacacaggaaacatgaaaaagcaaggaaatatgatacctccaaaggaacacacaattctccagcaaaaaaatcccaatcaaaaagaaattcacaaaaccccagatgaacaattcaaaatattgattttaaagaagctaaataagatataagagaattctgaaaaacaatagagagaattcagaaaaacagttcaggatatgaatgagaaatttatcaaagaaatagatatttttaaaagaaccaaacagaaattctggaactaaagattcattgaatgcaataaaaaatacatcccaaactccaccaatagactagatcaggcaaaagaaagaatctcagaacttgaagacaggtcttttgaaacaacctattcagacaaaaataaagagaaaagaataaaaaagaatgagcaaacccttcatgatatatggggcagtgtaaagcaactgaatattcaaatcatcagtgtccccaagggtgaagagagaatgaaagattagaaatcctatttaatgaaatattagatcaaaacttcccaaatataacaacaaacctagacatccagatgcaggaggcccaaaggtccccaaacagatacaatgcaaaatcatcttctccacagcacgttataatcaaaccacttaaagtcaaagcaaaagcaaatatactaaaaagagcaaaagaaaatcttctaattacccataaaggaaccaccattagactaacagtggatttctcagcagacaccttacaggccaggagagaaggggatgacattttcaaagtgctgaaagaaaaatactgccacccaaggagaccatgtccagcaaaactattcttcataaataaaagaaaaataaagcctttcccaggtaagcaaacactgagggaattcatcaccactagactgatcctagaagaaatactcaaaggaatcttaaacgtggaagtaaaaggacaatatttaccatcataaaaacacacaaaagtataaaactcactggtaaaccaaacatacaaataatcctgttaaatagtgggctaagaacatagatagacatttctcaaaagaagatatacaaatggccaacaggtatatgaaaaaatgctcaatatcaccaaacagcagggaaatgcaaattacaaacacaatgagataccatcttaccccggctagaatggctgttattaaaaagactttttttaaaaaaatgctttgcagatgcaggaaaaaaaggaactcttatacactgtttgtgggaatgtaaattagtatagtcactacggaaaatattagagagacttctcaaaacaaaaacaggctgggcacggtggctcacacctgtaatcccagcagttttggaagcccgaggcgggcagatcacaaggtcaggagatcaagaccatcctggctaacacggtgaaaccctgtctctactaaaaatacaaaaaattggccaggcctggtgacaggtgcctgtcatcccagctacctgggaggctgaggcagaagaatggcatgaacccaggaggcggagcttgcagtgagctgaaatcacactactgcacactccagcctgggcgatagagtgagactccatctcaaaaacaaaaagaagaaaaaaaaactaactacacatagaattaccatatgatccagcaagtctactattgggtatttatccagaggcaaataaacttgtatcaaagggacacatacactcaacgtgcttatcatagaactattcacaatagcaaagatgtggaatcaacctaactgtccatggatggatgaatggataaagaaaatgtggtgtgtatatatatatatacacctctagaggtgttcactggttacttagggtacaccctatgtaaatgaagaggctaaagtgaagttacaaagttatttacttggtgtacaccctatgtaaatgaggaggatgaagtaatgttacaaagtcatttactgagtgtacaccctgtgtaaatgaagaggatatttcctgtcatagctgaagtgtttccatttgatttagttctaggaagtccttaggttccctgcctccaggccctattctcctgtctcaatttcactcagcataatgtcctctaggctcatgcatattgtagtgaattcccttccttttgaaggctgaatgctattccattgtctatatagagggtgttttgtttatccactcatctgctgaaggacacttgggttgctttcatgttttagctattgggaataatgctgctatgaacatgaatgtacacaattttatgcttttctttctttctttttttttttttttttgagatggagtctctcgttgtgtcacccaggctgcagtgcagtggtgtgatctgagatcactgcaacctctgccttctgggttcaagcaattctcctgcctcagcctcccaagtagctggaattacaggcacccgccaccacacctggctaatttttgtatttttaatagagatggggtttcctcttggccaggctggtctcaagctcccgatctcaagtgatctgctctcctcagcctcccaaagtgctgggattacaggcatgaaccaatgtgcccggcccacaattttattcttaatggaatttctccctctgctttgcttttaggcccagacccatggaaagtggcctgtcaagtggtacgctccggaatgcatcaactactacaagttctccagcaaaagcgatgtctggagctttggagtgttgatgtgggaagcattctcctatgggcagaagccatatcgagtgagccagtcctgcttcattttctcactgtggggccattagaacagataagcaccagattgtctttacaacaacctgaaaatcctaatctgagtctctcattatcttttaccagtaagcagttaatgtgccctcagtctattccaaactgagaatgaaatatctgatgctcactgaagagtgtgtttttcccattgtgtgtcaacacatgtaaatatacacaaaatataacccagatcattactcattagagttgaaatagaaataatgactatttacagtatcttaattacattttttagatcttttaattaaaacatatataccaaaaagggcacaactcttagcatgcagtacagtggttttccacaaatgaaacatacccatgaaatcagcccccagatgaagaacagaaccccagaagcctgtttcctctgcacacacagccttccccaggggtgacccaactgactccaacatcacagattaagtgctcctgtttttatacttcgtataattgaaatcatacaatgtgtactccttcatgtcttggagtggctgttttgttttgtttgactaacacctttaaaaaaaaaaaagcttatgcatatcttgcatgttgtaggggatgaaaggaagtgaagtcaccgctatgttagagaaaggagagcggatggggtgccctgcagggtgtccaagagagatgtacgatctcatgaatctgtgctggacatacgagtgagtacctgacactgactgtgatgtattcagatgctctggaaacaggtgaaatggttgggcgtctaaaaaaaaggataaagttcaccttttcatgaatcaggaatgtgcccgctttctaaacaaacaacggtgggggctggtcttgctttagagaccttgctttctggcccatgcacttacatgtagtagagcctaaagagcaagtttagatggggactctaacccgagtgtccaaatttaaatgtcgataatggtggagagatggggcaagggcagtcaaagtaaaaaagtgtttgtaagagtttggggctggatgccatttttggcatagaggatggcagaagcactcggtaggggatggtatactttcctgactccctgattaccatgagcagtgaggggtgacctcggactctggccagctcacagatacattggctaaggttgcacttccctagaatctacctcatccttgaagtggtggcctcagtccaccctgactgccgtcatacgtctcgcttagtggatcccaggtgctgttatgcttttaaagtacacctggcattattcttaggtgatgttcagggcagctcagcaaggaaggaaaatgcattgccactgaaaattaggagtacagttttgccaggctcagcagcctgcttgtgcgtgcatagcacggtgaccccaagccgccatctccagttccctggtactgaactgtgcacacagagcccacacagctgagaatcgatgtggtttgtgatcaggaggacatcacaaatcctggccatggatttgatgctttgcggaatcaggtttgccttcagatacagctgacattgccagagcctctgaaagatgagggctattccaaatgctgcagatgccacctgggattccgagacctcccctccccaccctgggagtatcactctaccacaattgtgagtgacagggaaataatctcattctgtatctagaaaccacccagggggcagccacaaaggcagcaggcaaactgtgggtatatgcttccctgcccctgctgctgccgtggctcaggagaggagcctggcctgggccccggagcatcttctccaaccccaagtgttagtgcaacagggagagctaagtgtcagcaagagggaagtgctactcatggatctaagaggatgtttattcctaagtcttggcttaattctcccagtgcctaaactagaatcgtaagaaccattggcaggtaggcactggcagcactggaccctggggagggcagcccttgggcacgtggcagcctatgaccctttactgaaagtgttctttggtccagcctgcagctccctttgcaaggcttcccttcttgtagaagggtga

SEQ ID NO: 233 - DNA, 2541 bp, Homo sapiens
gaggaagagccgcgggcccggcggctgaggccaccccggcggcggctggagagcgaggaggagcgggtggccccgcgctgcgcccgccctcgcctcacctggcgcaggtggacacctgcgcaggtgtgtgccctccggcccctgaagcatggccagcagcggcatggctgacagcgccaaccacctgcccttctttttcggcaacatcacccgggaggaggcagaagattacctggtccaggggggcatgagtgatgggctttatttgctgcgccagagccgcaactacctgggtggcttcgccctgtccgtggcccacgggaggaaggcacaccactacaccatcgagcgggagctgaatggcacctacgccatcgccggtggcaggacccatgccagccccgccgacctctgccactaccactcccaggagtctgatggcctggtctgcctcctcaagaagcccttcaaccggccccaaggggtgcagcccaagactgggccctttgaggatttgaaggaaaacctcatcagggaatatgtgaagcagacatggaacctgcagggtcaggctctggagcaggccatcatcagtcagaagcctcagctggagaagctgatcgctaccacagcccatgaaaaaatgccttggttccatggaaaaatctctcgggaagaatctgagcaaattgtcctgataggatcaaagacaaatggaaagttcctgatccgagccagagacaacaacggctcctacgccctgtgcctgctgcacgaagggaaggtgctgcactatcgcatcgacaaagacaagacagggaagctctccatccccgagggaaagaagttcgacacgctctggcagctagtcgagcattattcttataaagcagatggtttgttaagagttcttactgtcccatgtcaaaaaatcggcacacagggaaatgttaattttggaggccgtccacaacttccaggttcccatcctgcgtcctcccctgcccaagggaaccggcaagagagtactgtgtcattcaatccgtatgagccagaacttgcaccctgggctgcagacaaaggcccccagagagaagccctacccatggacacagaggtgtacgagagcccctacgcggaccccgaggagatcaggcccaaggaggtttacctggaccgaaagctgctgacgctggaagacaaagaactgggctctggtaattttggaactgtgaaaaagggctactaccaaatgaaaaaagttgtgaaaaccgtggctgtgaaaatactgaaaaacgaggccaatgaccccgctcttaaagatgagttattagcagaagcaaatgtcatgcagcagctggacaacccgtacatcgtgcggatgatcgggatatgcgaggccgagtcctggatgctggttatggagatggcagaacttggtcccctcaataagtatttgcagcagaacagacatgtcaaggataagaacatcatagaactggttcatcaggtttccatgggcatgaagtacttggaggagagcaattttgtgcacagagatctggctgcaagaaatgtgttgctagttacccaacattacgccaagatcagtgatttcggactttccaaagcactgcgtgctgatgaaaactactacaaggcccagacccatggaaagtggcctgtcaagtggtacgctccggaatgcatcaactactacaagttctccagcaaaagcgatgtctggagctttggagtgttgatgtgggaagcattctcctatgggcagaagccatatcgagggatgaaaggaagtgaagtcaccgctatgttagagaaaggagagcggatggggtgccctgcagggtgtccaagagagatgtacgatctcatgaatctgtgctggacatacgatgtggaaaacaggcccggattcgcagcagtggaactgcggctgcgcaattactactatgacgtggtgaactaaccgctcccgcacctgtcggtggctgcctttgatcacaggagcaatcacaggaaaatgtatccagaggaattgattgtcagccacctccctctgccagtcgggagagccaggcttggatggaacatgcccacaacttgtcacccaaagcctgtcccaggactcaccctccacaaagcaaaggcagtcccgggagaaaagacggatggcaggatccaaggggctagctggatttgtttgttttcttgtctgtgtgattttcatacaggttatttttacgatctgtttccaaatccctttcatgtctttccacttctctgggtcccggggtgcatttgttactcatcgggcccagggacattgcagagtggcctagagcactctcaccccaagcggccttttccaaatgcccaaggatgccttagcatgtgactcctgaagggaaggcaaaggcagaggaatttggctgcttctacggccatgagactgatccctggccactgaaaagctttcctgacaataaaaatgttttgaggctttaaaaagaaaaaaaaaaa

SEQ ID NO: 234 - DNA, 1839 bp, Homo sapiens
atggccagcagcggcatggctgacagcgccaaccacctgcccttctttttcggcaacatcacccgggaggaggcagaagattacctggtccaggggggcatgagtgatgggctttatttgctgcgccagagccgcaactacctgggtggcttcgccctgtccgtggcccacgggaggaaggcacaccactacaccatcgagcgggagctgaatggcacctacgccatcgccggtggcaggacccatgccagccccgccgacctctgccactaccactcccaggagtctgatggcctggtctgcctcctcaagaagcccttcaaccggccccaaggggtgcagcccaagactgggccctttgaggatttgaaggaaaacctcatcagggaatatgtgaagcagacatggaacctgcagggtcaggctctggagcaggccatcatcagtcagaagcctcagctggagaagctgatcgctaccacagcccatgaaaaaatgccttggttccatggaaaaatctctcgggaagaatctgagcaaattgtcctgataggatcaaagacaaatggaaagttcctgatccgagccagagacaacaacggctcctacgccctgtgcctgctgcacgaagggaaggtgctgcactatcgcatcgacaaagacaagacagggaagctctccatccccgagggaaagaagttcgacacgctctggcagctagtcgagcattattcttataaagcagatggtttgttaagagttcttactgtcccatgtcaaaaaatcggcacacagggaaatgttaattttggaggccgtccacaacttccaggttcccatcctgcgtcctcccctgcccaagggaaccggcaagagagtactgtgtcattcaatccgtatgagccagaacttgcaccctgggctgcagacaaaggcccccagagagaagccctacccatggacacagaggtgtacgagagcccctacgcggaccccgaggagatcaggcccaaggaggtttacctggaccgaaagctgctgacgctggaagacaaagaactgggctctggtaattttggaactgtgaaaaagggctactaccaaatgaaaaaagttgtgaaaaccgtggctgtgaaaatactgaaaaacgaggccaatgaccccgctcttaaagatgagttattagcagaagcaaatgtcatgcagcagctggacaacccgtacatcgtgcggatgatcgggatatgcgaggccgagtcctggatgctggttatggagatggcagaacttggtcccctcaataagtatttgcagcagaacagacatgtcaaggataagaacatcatagaactggttcatcaggtttccatgggcatgaagtacttggaggagagcaattttgtgcacagagatctggctgcaagaaatgtgttgctagttacccaacattacgccaagatcagtgatttcggactttccaaagcactgcgtgctgatgaaaactactacaaggcccagacccatggaaagtggcctgtcaagtggtacgctccggaatgcatcaactactacaagttctccagcaaaagcgatgtctggagctttggagtgttgatgtgggaagcattctcctatgggcagaagccatatcgagggatgaaaggaagtgaagtcaccgctatgttagagaaaggagagcggatggggtgccctgcagggtgtccaagagagatgtacgatctcatgaatctgtgctggacatacgatgtggaaaacaggcccggattcgcagcagtggaactgcggctgcgcaattactactatgacgtggtgaactaa

SEQ ID NO: 235 - DNA, 50396 bp, Mus musculus
  misc_feature (2660)..(2731): "n" at positions 2660 to 2731 can be any base
  misc_feature (46151)..(46186): "n" at positions 46151 to 46186 can be any base
aagagggcactagatctcattatagatggttgtaagccaccatgtggttgctgggaattgaactcaggacctccggaagaacggacagtgctcttaacctctgagccatctctccaagccctttgttttttgtttttgtttttgtttttttaatttctgatattagaaatttcttttattttttaattagatattttcttcatttacatttcaaatgctatcctgaaagtcctctataccctccccgcccccaccctgctccccaacccacccactcctgcttcctggctctggcattcccctcctttgtttgttttttgagtcagggtttctctgagtctctgtagaccaggctggcctggaagagacaaagagatctcactgagatttttatacacactcagagaaagagacagagacacaggggtgagggtggctggtattaaaggtgctggccaccactgtccaactaggatgtgttcttaaaacattctaggtactggttgtttataaggcttgaggcagaattgcttgaagatgggagatagaccagcaagaaggccatgaggcctaaagggtgttttgggggtggggtggggcaggggagagggttggttgttttatatcaaggcccttccattcctaattagcaaggcttcatttaggtcccagatagcttctagacttggaaaaaaagttttttttgtttttgtttgttcgttcgttttttttttttttaaagcaacaagggctctttttttttttttaaagatttattaattatatgtaagtacactgtagctgtcctcagagactccagaagagggcgccagatctcattacggatggttgtgagccaccatgtgtttgccgggatttgaactcaggacctttggaagagcagtcagtgctcttacccactgagtcatctcaccagccgttcgttttgttttttttaccacttggactactgacctaggtgggatttgccgctggggttaagggagtaggatgaggtctataaagaactgagagtaataagtgctcctgaggcagcagagccactttgtttctaacgcttggggtctgaacattgaaatcaccgtttatgtgtggtttcacagattcagctctttaaatggacatgatacttagctttgaatcctctccattcttgggctggtgagcaggaagccggccttttcactatagctcactctgccccatagcaggtacttcagtcagtgtgggggagggaaggaaattgtttgtagaggagaattttaaaaataaggcattgctgaatttttaaaaagaagcattacctttctcaggactcagccctgacaattagctccattaacacacaaatacctgtctccactgcaaaagggtagaaaaacttcccatgctatttggtgaaaattgagttgtgcccagaaacgatatctttgtttctaagcacaagttgtacttacagttccttccctttggagagggcatgctgccactttcatctgacttcaggtgagtttccagaggatcatacctagaacagtgtttaagagtttcgaagaagccaggtgtggtggcgcacgcctttaatcccagcactcgggaggcagaggcaggtggatttcagagtttgcggccagcctgatctacaaagtgagttccaggacagccagggctatcagagaaaccctgtctcggaaaaaaaaagagttacgttgttgctgataggtacatatgccatgtacataaaactttctttcacccacttttcgagtcatgctgatacctggccatggccttcatgtagtgtgagaaagtggagagaaagagtgggcagcaagccaggatgttaaactgttttggggtgtggggtggtgtagtaaaataaacgggaagtttgacaagagaattaaaagacaattcctgaatattagtttttttcacttctgaaacatggatatataagccccaagatccgccatttagatgtttaaacaaatttggataagtaccgaggttgcatcattatgaaactaaccagaagtggctgtgcgctccagttgtaccggaacaaaatgatgctggcacagcaagcttcatgtcctttagaactttattataaagttggagatgttttttagatacattggtatatttgcattatagacttaatgaatgtatgtaatgccaaacaatgctaaaatactgactttttaaaaaaaatattagtaagttaggagtgttggtgggtagttcaaggtaatcctaaactacctagtgagtttgaaatcaattgggctacataagaccttgtctttaaaatatcaaaataataattaaagaaatgatttaaacatacagactatattacactatattacaaagatctctcagtttatatttacagaattccgagttatatctaattgcctttcttctctttcctaatccttctttactctcttgaagtggttttaaggcaaacccccaaatcttgccccccccccccccgccccaatgaataacaagttaggagttcaaatctggtaggatatctagcaggaaaacaatagttttcttctgttttctgtctgatttttcccttctaaaaatgtatatacagctgaattttttttttttttttnnnnnnnnnnnnnnnnnnnnnnnnnnnnnnnnnnnnnnnnnnnnnnnnnnnnnnnnnnnnnnnnnnnnnnnnttaatatgtagcccaggttgacccagttctcacagtcctcctgcttaggtttgtttgtttgtttgtttgtttttttaagatttatttatttatttattatatgtaagtgcactgtagctgtcctcagacactccagaagagggagtcagatcttgttacggatggttgtgagccaccatgtggttgctgggatttgaacttctgacctttggaagagcagtcgggtgctcttacccactgagccatctcaccagcccctgcttaggtttttgagtgcttagattagaagtgtgtcccacctcaccgaatttgaaaatgttaattatttagggaactatttacaaataaattcaacactagctcatagctgaacttcttatatacgtccctatccatttctctaccttttgctcgttttgaggaggctttttaaaaattaattaatttattttatatatgtgggtacactgtagctgtagatggttatgagccttcatgtggttgttgggaattgaattttaggacccctgctccctctggcccaaaggtttatttattattatacataagtacactgtagttgacttcagtcaggcgcaccagaagagggcatcagatctcattacaggtagttgtgagccactatgtggttgctgggatttgaactcaggacttttggaagagcagtcagtgctcttacccagagtcatctcaccagcccccaaggagacttttcttaaatacttttttgttcctttaaatataatcgtaaacggtactattatcacactttaaaatgttagcagttgcttcttatatagcccctcagcacacttgtttgcttgggtttggctttatggagttggtctaatcttacaccttccttcttcctccctccctccctttcacattgagacagtttttcattttgcagtcctgtctagcctgaaactcactatatagaccaggctggccttagactcacagagatccaactatttttgcctcccgagttctaggatataaagcattgacctactattcccagccacgatcataactttaaatcttttagaaattcttgtctttggaaatagcatctgaaagcttggtggtagtgactggtggatacatttagtcccagaacttaggaggcagaggtaggcagatatctgtgaatcctctaggctagcatggtctacagaaggagagttctgggatatctagagctatacagtgagaccctgactcaaaaaaccaaaggaaaaaagaaagaaaaaagaaaatagcatctcaaactaggacaatagtgttctttgtcaatgtgacttctcagatgtcaggcattaaccttggagttgtactgttgaaggggacacttcagtagtatatcacttcagtagtatatcacttcagtagtatatcacttcagtagtatatcactgagaggcttatgggatgagggcgtatcagactgattatctcactatgtgatatagatgatgtttgtttctttgtttttcaaggcagagtttcaggttaaagacatgtacatctctacccagcttcataaataaataatatttttttcagaccagagtgaaaagtgatttagtgaggccctatttgtatgttggagaaattgaaattatttttcaagacatgcaccattaaattttaaattctagtttattttttgtatgtgtgcacacagagaaatcagaggacaacctgaaggagttcattctcctgggcaatcaagtcaggctctgggtttgacagcagataccttctggcgaagccatcttgatggctcgtatttctccttttcatcagtggcaggcttgcagcccaagtatcgtcagtaactgtgtgagataatggggtcctgaggtcactgctgtgcctgtcctggctccttcacagggtcttgaccagaggagcgctgtgctgctgatgcctttgtcacaaagttgggggctttatatctcataccatcacgtgaactgttctaatcgtgctgacattttatttaaagatatagcatgttacttccaggagatcacaccaacttgtttgtcacatctttagtcccatgttcttacatcatttaaatttcctgaacagcagctctaatttaaagctgacggcagatgtgggtcatgggcagtcgtgagcctcagcaggtgctgtcttagtggattaggctggaaagtgctacctcagcacagccagagcttacctgggaggctctggaggaggagagctgcccaggcaggcagaccggatggtggggtttccagaagggtcaaaggactaacgacactaaagagaaaggcagaggagacgaaacgtaagtaagacgtgtttctaattgctaaagttgtgtaaacagtattatggcagactcttcagttgtgtgctgcacttcactcagactgtgagaaggtaatattgggacagcaggtaaaggcactcgctgtgatgttgcatggcaggagagaaccagctatttcaggttatcctctgtccttggaatatgtgttgtggtacatacccatacacaattaaataggtaaaatgatagaagaaaattactttaaagatcgttttctgcccagcagtggtagtagtacacgaggccagcctggtctataaagcaagtttcaggataaccagggctatacaaagaaaccctgtcttggaaaaaaccaaaaacaaacaaacaaaaagttgttaaaaaaaaaaaatcctgctgtgtgggaggcagagggtgactcaggcgcagttttctcctccctcctttacatgggtgggttctagggggtgaactagggtccccaggcttgcatagcaagggacttaacccacagaacctggaaatcattcttttgattgaatgctttcttcatatacaagaaaaatatgtgacagtcatccaggtaatattgcttaaaagtagaaaaatgtatttaccagaaacctagtgaggaatagaactgatgggctattgagataactttgggtaaggttggtggctgccatgcctgaggagtttttgaagcagctcagaaagatcccctgtttatacaacactggttcagcatagttgtattcggtctcatgatgtaagagctttagtgtttatgtcctgctcaactgctgcttgttgattagactaaatcaggtacctcaggactttggttgctactttttcttacgttaatgctggattggatggaaggtctttatagccagagttcctttcagtcaagtaaggagtgctgaaaggtggtgatcttgactctgttaaactagtaagagggtttcttctttgaccctttgtaaggtaaaaacaagtcaaactcatgcgagacaaaaatggcagagtatctttctgtgtttttattcatttgggattttattctgccatataggaatgaatattcctaaatctagtaagagggtttcttcttggaccctttgtaaggtaaaaacaagtcaaactcatgcgagacaaaaatggcagagtatctttctgtgtttttattcatttgggattttattctgccatataggaatgaatattcctaaattttagatcttaggttttgtgttctaaagagaatggctcagtcttctcctgcaaaagtcatgccaggtaccagggaggcccaaggtgtctcccttggtgaatcaggatccactcaagaaccagagatggtggatataacctgtaatactagccctggggaaggggagggagtaaggtcagagtaggtgccaagggaagttttagtatatactgtactgcttagcaagacactgtcttaagaaaggcaggaacgtgactggagagatggctcagcacttttccagaggctctgagttcaattcccagcaaccacacagtggctcacaaccatctatactggtgggatctgatgctctcttctggcatgcagctatacatacagacagacactcaacatacataccataaataaataaataaataaataaataaataaataaataaatatttaaaaaaaaagacaagcaggataaggagcatcaacagaaaatgagagtatcattgtggtcagcaatcttttagaagccgtcttgatgtataccctgcttttcaagtgagcagcagcagcagctggtctaggaacatggaagccctctttcagtgcacagctttaccttgtaggccttggttgcccgtgccccccccccccatgttaagtacttagtaagtcgacccttctttttgttctgccagcagcaaagacacttagttggaagggattctgtcaccatgagcatatagtgtggaactgtagaatagagaagtaaggaacgtgaacagttctggggtcatccagctgatttattgtagatgtgtcttactctaacagtgatctcaggacacagcaggcagagctcggtgtgaagccagcccagtctacaaagcaagttccagaacagctagggccacacagtataaccctctcttgggtggtggtggggggcaaggaaaagaaattaatattggttagttaagcatttggtattttttaactttgacttttgacaaaaagttgatcttgatacacaatcctaagagatctggagcccactatattgcccgagaggtcttagactcaaaaggaatctttctgcctctgcatatcccaaattctgagattatgggtatgctatcatacctaactttattattattattataaaatttgtgtgtgcgtgtgtgttttatgtttctgtaggtatgctcatgtatgtatgtatatgtttatgtatgtatttacatgtttatgcaggtatattcatctatgtatgtatggaggctgatcattattttattagttgacctcacttgtcaacacagggtcttactgaaccagagcagtggttctcaacccgtgggtcatgaccctttttgggagttgaatgactttcacaggggtggcctaagaccactggaaaacagacatttatattatggatcgcacagaggcaaagttacaatcatgagtagcaacataaataattttatagttgggagtcaccaccacatgaggaactatattaaagggtagcagcattaggaaggttaaaaaccactagaggttttcatttcaactagattaatttgtcattgaacccaagaatccatgtgtatctgcccacaccattttgaacctctttaattattacacaaaatttttgaagattgtgtggggagtgctggaagatgattcagtagttaaatgcacttggtgcccttccagaggaccctagtttcattctcaatgcctacatgacagctaacaaaccatatgactcagattccagggaatctgtatgtgtgtgtgtcaaaaacactcatattctgtgtaatttgcatggggaactaagattcttgcataaattatattggtattaagttgtttcaccttcaatattatggtgttataatcacatttataattgatttaataaccaacatcaggtcagaattgtagcctgtgtgccccaggtacagtggtagatgaggcctgctgttctaacacttaaagagtctgaggcaggagatttgctattagttcgaggccagcataggccacagaaataagttcaggcaggcacgcaggcatttctatgtacagcttcctctgggaagtgaagtctttttgtgctgttgtttattttggattgggcttttgagacaggatctctgcggtcttggctggactggactggtgcataggtctggctggccttgagttcggatcctccctttcctgcttcccagctgctggctcgggttaaaggcaggctctacactctgaggtattttatttaaggcatgctctacactctgaggtattttattttctgaggcagtgtctcatggagcacagactggccttagactactgtgtagctgaagatgacattgaactttttgcttccacatcctgagtggaattataggttagcaacacctcatgtgggaattcatacattgtaggtaatcagtctactagctgaactatatctccaacccaggaggtcaggtttgtttgtttgtttaacaatctagttttgaaacagtcatatcctaggctggcctcaagttatgtagtcaaagatggccttaaaagatgactcttggttattttccaagtgctgggattatagatatgcacaccaccacacctcatttgtctcggggctggactcaaatccagagcttcatgcatgtgaggcaagcactgtaccaactcgacttttgcatactccattgaaagtcatttttataacaggatcatctcagttgtctctgacaatggggatgttttatatgactgtgtatggctttgcagctttgacagccttattcaagcccatatctagaaggtatttctgagcttcctgggactcctcagcatagagtctggggagaaatagaagacttttgaatgtccctttgtctttcggctcatgataactgccatagcttcaaagtactggttttccagattacctcagtcctgtttcttaaagaaattactcctggtttctctgtgtggtagctattctggatgtctgtgtttgttgttgttcttcttcttcttgatttctttcttttattattttttaaagatttatttatttattattacatgtaagtactgtagctaccttcagacaccccagaagagggcatcggatctcattacggatggctgtgagccaccatgtggttgctgggatttgaactcaggacctctggaagagcagtcggcgttcttaaccactgagcaatctctccagaccctgttcttgatttctgagagactcagaatctttccatgagaaggacctgtgctgttttaatattgattgattgattgattgattgattgattggagattgggtctctgtggtacagattggcattgaaattaagatcttccttcttggccacctaagtagtggaatgcaccacctctattggcattaattttctttttcagtccaccacaatattttcagcagtatattagtacagttaataaaagtgaagattgtgtttttaatccagttctagatagagtttcaaaagttctgatgagtgctgcagaaaaggtctctgcattgtgtgattgtagctgtgacgttttcagttaatcataccgtatcttatgcatttcttgccatgtttctgttgcagagcttggattctgaagtgtggaaagcactgagacgtgaagatgagtgaacttgaccagctgcggcaggaggccgagcaactgaagaaccaaattagagtatgtagtcatgcgggtttgatatgtttcatatcagaaacatatctattgtgtgtggataacagagtgagatgaaattgatctattatatgctagttatatatctgaataacttatgttgtttcagaaattttgttttcttattagctacaagttgttgcttgaatgtacatggcccatgtctgtaatacttaccaaagcttttgaacgtcttcctcccggggaactaggttttggaccctctgtgtggccactgtggccgctgtgtcagttctgaagcagctctgaagagcacggctactaaactgagagcagaaatagatactttaaatgaagggatccgtaaagtggcattttagatgtctctgtcttatttttcatagtttcgcaatggtttgtgctccaggaagaccattggaatgtatgtaacagctcttaggccaccatagagagcagacttgtctacctgggtacaaaactaaatggaagataattccatgtattctgagttgttctttctgtgctggggactagtgttagaaatggagctaagagcccacacatcccaggcaaatgtgagttttttggttttggggtttgtattttagttttgttacttgagacaggttcttactatgtaactttgtcctgaaactcagtgtagaccagactggccttgaatgcaacattatacagagataagtatgtggggttttttgtttgtttgtttgttttttgtttttcttagacttgatctaagagcatggaaaaaatgacttaagacttaacaagaaaatcccagtttttcgtttgtgtaaggatttgtatatttgaaatagcttcctctgattttcatgttcttgtctgtaaggatatggctgtctgtccttgagcgtctcactaagcctttagaatggttcacatgtctttaacttgtcagttgtgttctcaggctgccaggaggactaggtggagaattgccagcatcattttagccaacttttacttgaatttaagaaaacataccagaactgcataagttttagagcagagataaaacaaaatatcctctgctgtaagcacctcactggacattggtgtctacgctgttcctccgtgtgtcagtttctgtaaagttaataatttcatgtgtcaggcaagtttatagcactgaactatacctagcccttgcctaaaatctttttagggttaggatttttggaagtggggcatcaagttgggttttactatggtactaagatgatgtcaaaatttgagttcaaatgatcccatgtgtcagtctcccttgtagctgggattgtgtagcatgcctgactttccctaaacttttgcatgacttaaaaacttaaagccaacttaaagccaggggctgagcattttaatcactgcatttaggaggaagaagcagagcgataagagttcaaagtcatgatcagctacatagtgagctcaaggctcaccacgagaccatctctcaaaaggtaacaacagactggagaggtgtctcaacaattaacagcccttactacactttcgaaggactccattaggttcccagtgcccagatcaagaggctcacaatcttatgtaactcttaactccaaggaatttgacaccttcttctggcctctgcagatactttcatatcccacacataaacacacacaaaataaaagtttaaagtcaggtacaatagggcatgtctgtaatgctatcaagtctgaatactgaaggagtattgaaggtttgaggcctgcgcatgggccatatgcttttgagatttttatttctttgtcccaaagttctgaaaattaagagtatagaaatgacagaggagttttcagacaaggtctcactatgtagctgtggcagtccgagaactcactatatagaccagtgctggagactaaaggtgactaaagccaccacgcctggcttttgtggtttgaacttcctggtttttcaagacagtttccctgtgtgaccctgtgactgtcctggaactcactttgtagaccaggctgccttcaaacccatagaaatacccttcctctgtctcccaatgatgaaatcacactgcttggtgtgatttcagtttttaaaacgggagcagggtggagatggctatgctgttttaaattaagccaacatggagatcaactgcacagcatggagggaagatttagggaaaggataagaaagcccaagtgttgaagaaagcatacttagaacagatagaaaggagaaaaagaaatactcagaaaaactagcggatttactaagccatatggttgtagctgtgtagctgctgagactcaaatcatttagcagtagataaagagatttttaaaaaagatttgtttgtttgtttgtttattatatgtgtgaacactgtagctgtcttaagactctcaagaagagggcatcagatttttgttacagatggttgtgagtcaccatgtggttgctgggatttgaactcaggacctttggaagagcagttggtgctcttaactgctgagccatctctccagcccagataaagagagatagtaaatcaaagataaatgtcatgcaatattttgataagcaggtttacatactctctagtccctagtacccacccgcctttctgcatccaaatagtgcccctgtaattatagcattcaagaggtaaaaacaggagggtcagagttcaaggccagcttcagtgacatatcaagtttgaggccaactgggcaacataaagtgttatgtttaacatatgatgttatgttaatatatattagtaatatgaaatcttaagtttcatctagtcccatgtaaagtattatttcagtcaatagattcttactgagatagtttacagtacttacatttcagttttgttttggttttaaagttcagctcatgcctccctataagggcattctacagttctctctcactgtgtctgacatgcacagatagttggtgacccccccaagacctctgttgtggacagcaccaatttgactgttccttatagggccactttgtttcaaccttcatgatgagcatcatcttcacaaatggctccatgggtttggccttgcctctcagcactgcactaattttagagtcgattggtgaggagatgtgaaggccattgagtctctaaatgggaagggaagacttttgtttgtttttgagacatggtctcactatgtagccttggctgccctgcaacttgatatgtagactactggcctcaaactgcttgcctctgcctccccagtttactttggagactaaagctgtgtgctaccttacctggcaaggaatactctttaaaaaagtaaaattctggagttagatacttaagtggttaagtttaatcccagcactgcttataactgtagctccagagaatccaagactgcctgtcttttggtttcaataggtacctgcatacacataaatttaaaaacaaaaacaaaaaacttttttttctgatataagggaggaaaaatgtaaaatgttctttactaattgcctactaaatacatgcttgctaaagaacttagtacaagggctggaaggatggcataactcagtagtagtctagtgctttcctagcagtgtggtccccaaagttacagggaaaatacgaggattatcttcactttgaaggccagcctaaactaccaatcaagaacctgtcttaaaatcagaagcaggaatccgggcctggtggtgtacgcctttaatccaagcactcgggaggcagaggcaggaggatttttgagttcgaggccagcctggtctacaaagtgagttccaggattgggtgagacggcgagcacttttaatcttagcagtcaggaggcagagttaagtggatctctgtgaattctaggccggcctggtctacttaacaagttccaagatagaattatataaagaccctatctcaaaacaaacacaaaatcagaaatagcagatgagttaatcaatgaagtaaaggttcttgccacccaacagtgtaagcctgaaaacctgagttccatttctagagtccacgttaaggtggaaggagagagtactgtctctacaaagttgccccatgacctccatactctgtagcaagcacactgatacacatcagtcacactcttgggtttgtttgtttgtttggatttttaccaacaaagcgtttgtgggtgttttgttctcccctgtccccccactaacaccaacacagggtttctctgtgtatgcctggctatcttggaacttgctctgtagaccagactgacttcaaactcagagatccacctgcctctgccacttgagtacgtactggaataaaagctgtgtgccaccaccacctatacagtcaatatactttcaattattaaaaatcaacaaaaggcttctagctggtgtgtttatacacatacacagcttctcaaactcgggggccgaggcagaggatcaggagttcaaggtcatccttagccgcatagtaactttaagaccagtttgcttacacagtgaatcacacaagaaatggcagttaactgtaagaagtgttgtctggccctttgatttgttttttatgtgaacttcccctgggggaaaaaaggaaaaacaaaaaaagaagcttgtcattcttttgttgatcccaaggaaacaggctctcaagtagatgtttaattaaagcacacacgccttaaatacagaggaactgaacttactactctgatagaccattgcacacatggaccagaatgtagcgacccagagctgagggtgggcccagactttccaatttcactgtgagacaacagtgctgcatgatacgggccagcctcttctgtactcaaaccaaacaggacagaatgattgattaaatggatcagtctacatgaatccatcaagaaatcattgtaaagccgggggtgggggtggagttttttttttttttaaagatttatttattatttattatatgtaagtacactgtagctgtcttcagacacaccagaagagggcatcagatctcattatggatggttgtgagccaccatgtggttgctgggatttgaactctggacctttggaagagcagtcagtgctcttaaccactgagccatctctccagcccgggggtggaggttttaatcccagcattctggaggcagaggcaaacagatctctgagtttggggccagcctgggctacacagagaaaccctgtcttgaacaagcaagaaagggagggagggagggaaaggaaaggaagaaaggaaggaaaaaaaaagaaaagaaagaaagaaaaattattgtagctgggcacggtggcacagttctttaatcctgtcacttggggaggcagagacaggtcaatatgtataaggttgaggccatcctaatcaacattaagttttaggccagccaggtataagggaccctctcaatcataaatcaatcagtcattctcaggccagcagggtgagtcatcaactaaaagtatgtcaatatttattttacttataagtgaaaacactttaattaatatggtaaaaattaaagaaaaattactatagtatattgttttgtaggtcttagctacattggtatgttttataaatagaaaagattgctgttttgttaccagtcttattgaaattttattaacaattttagattccttggtctattcatagaacttagatttaatcattgtttggcttaaaaataaagtccttgcataatgcattctcaaagagaagctgttggcctgaatagctagttggttttcagcctgttctttcatgcaaccccttgtgctcccatataacctgggaaagacagagcaggtgtgtgttggctgtggggagtcagccttggcttccaggctgctcactgctgtaccagctcccagtgtagtttctcccgggcctgcccagagttctatggggtctgcatgtcttagttaggtttaggtgttgtgagttgtgtctgttttggcctgaacaactcaaaagtggcagtggacttgggactattagagaagaattaaggaacaagacagtttgtagaggcttcttgaaactttggtaaggaatgtcgtaaagttaaaagtatggaataaaactaatttccatttgttatttcataggatgctcgtaaagcgtgtgccgatgcgactctttctcaggtaaggaataattccacctttcagctgtccgtaatgcgcagtctgccgcgggcttgtatcatgtggggtgagcccttttgtgaggtgaggttgtagggccactgtcagggcttttcatttggaggttgctttgctgatgggcagagaggacaggaaccactggttcctaaaatgggagtgatagctctaccgtttgacccaacaatttaatcaaactgattttaaaacatgtaccaggctgatgagatgactgctaccaggcttgacaacccgagttccatcccagagctcacagggtagaaggagattcagaggtggttctctgacctctgtgagcatgtgccgctgtcctgcccaagtaaatacagttaaaccgtgggcatccagctcctgctgtagtgtatctactgctgtgagaaacacttcaaactctaagggaggaaagcatttatatcggtttatacttctaggtaataatatatcattggaaaatcagggcaggaaccatagaggaaaattgcttactggttgctttctcaaacagccaaagataatctaatctgtttagaagttgtcttgttcagtgtaggctggaccctcctacatctattagcaatccagacagtgctccatacataggcccacagaggaatctgatctaggcagtgtttaattgaagttctctcttctcaggtaactgtgtgtctagttaacaataaaaactagcaacacacacacacctatactcacacctactcttgggtaatcaatggcctgatcctcagacctaatagacatagatttattttccctgtgtatccatggcagtggtaaagtgagtatgttaggtaaaggtggagataactaataatttaataaagcagtaataaaatggtagctattctatgaaatggtagttacatgtgatatcagatgatcttaaaatatcttactgcatgtactggtgcgacaggggatgacagtgcctatatccttgataagaagaagcgaggtactgagccatgtaaaaagcatagtggttgtggtgtattgctgataaacatgctgtatacttaaagcatggactcactggacaagggagttaggacccaggcactacagagtggatagttaatagtgctacttaagggagcaatgtgcagccgggcagtggtggcgcactcctttaatcccagcacttgggaggcagaggcaggcggatttctgagttcgaggccagcctggtctatagagtgagttccaggacagccagggctatacagagaaaccctgtcttgtgggggaaaaagggggggggggaagcaatgtgcaatttaaagtttatgaattggctgctggagagatggctcagcagtttagagcacttgctgctcttctagaggactgggattctgtttccagcactctgtagtggttcacaactgtctataaatcttctggtctcctagggcttctgcatgctaaaaatattctctcacataaatataggattttccatttaatatatttttggttcttggttgatattatattacagagcccacagaacgcaaaccaagagtctatttgctaaaattaatcttcactaattttattttttaagatcacaaacaatattgatccagtgggaagaatccaaatgcggaccaggagaacactgagggggcatctggcaaagatttatgccatgcactggggcacagactcaaggtatgaatggggccttcctaaagcagtacttgaaatgttgcctatctgctggatttctaaaaggtaatggttagaaagttgaattggtgtgggtgtgatagcacactttgaatctctgtactcaggagacagaagcagacaaatctttgtgagtttaaaggccagcctgatttacatattgagttccaggctagccaaggctacaatgaaatccatctcaaaaccagtaggatggggtggggtaggaagtttgtggtaccagttatctgtatccaggtctcatgttcacaggtcatactcagatttccgtttagctggctgactgcactgctgtcccttgcatagcagcacctgcttttcttcaccctataccttttagctgttgggtctctgttgtcttggctactctgtgggctgtgttttaagagttgggcaatggaaggtaaaaggtactgagtttacaacagcagactgtggtcccaaaaactaaatgtagacttcagtggtctcttcaccctcactgggaagccttatggaaaatgaacgaatggctatccttatcatccttccacatggccctgcctgccatctactggtgtatcatttaaagagatactaccatttgggggttcctttcttttatactttgataactaccctttattggactgagtctctcctgacttttccactcataacgaaataaagtgcgacatggtttgtgttctccttccagacctaaaggaatctcagcatccttttcttctgagtcagttttcatttctgcttagctttctctttgtgaaattatctgctgtagggtgtaaatagctagaacaaaagattctatctttagttctctgcagggtcccatacaattgcttgtgcaaatgagcgctatctgaggctgtttaataatggaaacagtcccatcaaaaaagaaaaagggggcggggcattgtgttcttgctgcagctgcagcttcagttagatagatcatggatgtattctattgttgctgtcagaattgttaagtgcagatttgtagatttattgattgattgttttttcagtgccggacattgaacctagggtctcatgactgcaagcaattggtgtaccactaaggtgcacctctagtccaagaatagttaccatatggtcctaaaaatgtgagataatgactgtgttaattcacttagtttatattctgtaatataaacattaaacaacttacagtccatagttactgtcaattaaaaataaagatcataaaaaaaaaacctaagcaaagttagaaaatggacaaacaatggtggcactttttttttttttttttttttttttttttttaaactacagcccttggaattaaagcaatatagcaagttctaggacagcttgggctacacgaaaccctgtcttaaaaagcaaataaaccaggggctggtgagatggctcagtgggtaagagcacccgactgctcttccaaaggtccggagttcaaatcccagcaaccacatggtggctcacaaccatccgtaacgagatctgacgccctcttctggggtgtctgaagacagctacagtgtacttacatataataaataaataaatctttaaaaaaagaaaaacaaataaaccttgcaaagcattatttagggattgctttaaatgagcatactttctggctagtcagtggttgcattttaaaatctaaaatagctgtttaaggagttgttgtgggtatgcatacccctctacccccttacatcattttcatattttttgctctaatagtaaagggttgttattgagcttggtgtggttgcaaatgtctttaatcacagtacttgggagacagaggcaggtagatctccatgagatcaagggcaacctggtctacatagtgcgttttagaccaaccacgtagcacaaacttgaagacctaggtttcgatctctaggacacatgtaaaactgatcatggccagatacttagaaccccactgcttcagtctggtcgaggtaaaagaattattgggatcactggccctagcggaaaaatgatgagcttccggttcagtgtgagactgcttgagaggaataaggcagagagtctagaacagggaaacagtctgcttcctttgacttctgaataggaacacacacacacacacacacacacacacactaaaattcagctttgtgggggtgtgtggaggagtggcgggggtaggcatgtggaggtcagggcattatgaccaaggaatcagttctacttctaagtgggttcctgggaccaattggttggttggttggtttttttggggggggggggggtctttcaggaaatgtttccctgtgcatccttggctattcaggaattgtgtagatagggctggcctcaaactcagagatcctcctgcctctacctcctgaatgctgctggaattaaatggttgcaagagcccgggattagatttaatggaagggcttgtttgataggcacctttacctgagccttctctttagccctaaaatttaacttgtaatactattccagtagtgcttttccaggtctgtggggtttttaatcccctctctacagagcctgatgaagtagtctctttggctggtcttcctctgagtaaactgaagagtatgtggggttggtctatgagtgcctccttttgttctaggcagctaatttggctagttctcagtttctatctctgtttgaggacagaatatgaaaagctttagacaatgaaccgtgttgattcctccaagttacatgacctgagattagaaaggcgtgtcttctttcaccttctggaggatcagctaacagcttagcattgtcttaattcctcactgagttagcaattattgagctctctgaaggtgacttcttaaatcagaggatgagctactaaagatgtctcttgatacccttgctcagagtcaaaaagaccaagcagaaatagagcagcagaggggcctcatactgtctgtcctatagaaatggttgaaaggaccttgggtataatgactgaactgcaatagatggggagctggaaagactttgagtgactgttagccttggctacacagtaccctatctccaaggaaagtaaaagaatcgtctgaggagttggaaatactaggttgtagttgagttccctgtattctcaaggctccagagtttagtccctagaacctcataaagaaaaaattttaccagaggactgaggtgcaattaattggtgaagtacaatttactgtgaattcaatctctagaactgaaaaagaaataaaagttgtagctgaaaagaaactggatgtctgtgcctagttctgtgataaattttgtgactaaggatggaaaaggattttatttcttgtcacatatatatgttgttctttataaaggaaatttacatatcagaacatagcttggcagggtatgatgtagtacagctttaatgcaagcactttggaggcagagacaagtagacctctgtgagtttgaggtcatcccggtctacataataagttccaggacagtcaaagctacataatagaggaaccctgtctcaaaaaggcaagtgagtcagtcatacaagcatggtctgattaaaagtgtcagagggctcaaaatggcgtggttgagttttacctcaagtctttgatgagcttcagaagttcaaatatgcccaaatatacttgtggctgaaatacctagaatgtatatattttgattacaatttgaagttaaaacctgtatgtcactatcacatggtagacctgggagagcctctcacccttccttaagagcacattgtgtctgagtaatggtgcttcccagaattgctctcactcagttacttcccagataactgagattcctttgcttgttggtcatgcttgccttatgcagtatatcctgcctcagtctacaatgcagagaactgcaggttccaaactaggacagagtcatgagcaattcataattcactataattggtggcctcttttgcccaaccatgtgcaattctgatgtcatttatcatctcactaccacacagttttatagagacaggtattctaatttatctctgtctgggaagtttgagagttcgtttttcttttaattttgagggatagagtctgggccttaaacttgttacatagtgaccttgaactaacactcacacacacactctctccccctctccctctccctccccttccccctcccttcctccctctctctgtctgatttatggtttctccacatcccacatttatgagttacaacgtatgctaccattggagctcatggttgtgttctagtttgatttctactggtgtgattaaacactgagcaagagcaacttgaagaagattttgtttgagtttatagttgtagtctatcatgaaaggaaatcagcaaagaccgcagaggaataccgcttactagctttctctttagggcttacttagcctgccatccaggactacatgcccaaagacgacactgcccacagtaaactggccatgctcacatcaattattaatcaaggacatacccataggtttacctatgtgccaataagatggagatattttctcagctgaggctccttcttccttagaggactctagcttctgtcctatcccaccccacccccaatataaataaaaacagggcaggtgtttaaaatggattaaaatggttcctgagtgggtagtgtttcaagcttttcccataatattcaagctttcttgctgtcagtatgaacaaaactgtgtcctaaatatttgacatgtctcatgtctctgtgtatctaatttaacttggaataaaaaagaaacccgtcagaagcaggtcagatcagtaccatctctcgggtgataagagaagagctggggagtctggtcatccaggtgtccccagggctgagttgttatctgacactcatggtattccattgctcaagcattgagatcctctttcttattattaagtgtattatattttaagcgaatgtagctttaaagctctagttggtcaccaagattttttgtttctgttttttcttttcctttatcttttctccaggctccttgtcagcgcctctcaggatggaaaactcatcatctgggacagttataccacaaacaaggtgggcagtgcaagaccctccctggaacagtgacagtctgttcatggagcaatgatgacctcggagggtgatagaagagcttgtgttgctgacccattgagcttggcacacagttgtgctgtggttcctgtcttggcatgtagataggagctgagtgcttccttgtccttgcacaagagctacactccactcctagttttgactggaaactttcctaatttattactagaatactgaaatgcagattccatttagttagtagtttgttttgtagtaacaagagataatctaagatgcactatactttaatgtttagtggaggattgggaatgtagctcagtggtagaatacttgtctactgggcataattccctggatttgattcccataaccagaaaagataaaaaaccaatgtaacccaacagattggtaaaagtctgtgattctagtaactcaggaggctaaggtaggatgatcgaataaacccagagggcaaacctgccatggctagataggggaaaggagaagacagagatactaggtagaatgtttgcctcataggtacaaatctctgaattaaatttccacttctcttatattgaaataaattacactgggtatggtggtacatgctcataatctatcatttgagaatgtaagcaggagcctcaagcattaaagattatgcttacccacataataaagtgaaaccagcctgaactacatgagaccttgtctctaaaaaatagtattcacaaaaaaccaaacaaacggggctggcgggatggctcagtggttaagagcaccgactgctcttctgaaggttctgagttcaaatcccagcaaccatatggtggctcacaaccatccgtaatgaaatctgatggcctcttctggagtatctgaggatagctacagtgtacttacatataaataaaaaaaaaaaaattaaaaaaaaatttaaaaaaacaaacaaaaaagaatacatttaaattctgagtggttgcagtggccagtctataattctagcatttggaagacagagacaaggaatccacaaagcaatctggttatctagacctacagacgagctctagacagtcctgaggaacactgtctcacagaagaaggtggagagcagtcaggggagggcccgtgtcagcctcagcctccgtgtgcacaagcacacatgcgcataaagtacggggagccgagccaggcgtggtgatacacgactttaatctcagaagttgggaggcagaggcaggtagatctctgtgagttagggggccaccctgtctataaagtgagttccaagacagccagagctctagaaaccctgcctgcaaaaacgaacgaaaaggtgcagggctggaaagatcgctcagtcactgcctgatttttccagaacgtcttgagttttatccccagcgtctgcgtagtggtttgcagccttctgtgtgtcagttaaaggggaacccagagccctccctcctttagctttccaggctctgtactcagttaatcaacagttaatcaaatgttcctacagataacatgaaattaaatctcaagacaagttttaatgctgtcatcaattaaggaaaaaaaattggacagttgtattttccctcaaaattagtaaatacatgccaagattacagaatgttaactgctctatctaaacagcaagactaactgtgttaccaatgtgcagttaggttattgcatgtgtgtgtcagagagaatgaatatgaatgagttctgcctcagcttctttattgctgggatcggcatgaatcaccatgcctggctgttttttatgtgcttgtctttgtttttttttaagctcatagccatgataaattaaaggggaaagtaaatcttttcaaatcctattaacatcactccttaaatcattaaaatgcaaatataatttgtgttttctttgagatagttttccattatgtatagctcaaaatatcctcaaacttgccatcggggctggtgatatacaccctactggacaagacttttgagttcaagtctcagaaccaaaaaagacagacacgacaaaaagccctctttttctttctcttagctttccaactcctagattcactgacgtatgccatcacacctatctactcattagggttttttggtttggtttggtttggtttggtttggtttggttttgttttgttttgtttgtttttgagacagttttactatggagccctggctggcctcaaattcagagattcacctacctttgcctcctgagtgctggggctacaacataaactatacacccagctgtagtcatattttcttgaacttaatagtgtttcctgtctgtattcttgttatttaggttcatgccatccctctgcgctcctcttgggtcatgacctgcgcatacgctccttctgggaattatgtggcctgtggtggcctggataacatctgctccatttacaacctgaaaactcgtgaagggaatgtgcgtgtgagtcgtgagctggcgggacacacaggtacacatctcatgttccagtggtgtaagctgctaactgggatgtatactgctcttgtgatctgttgattattggttcaagtaaaagtgaaagtaacggccagaaattttctgaaagtgaagccaaaccagggccaatatgccttcatctttaagaaacatggaaactggttttttagccagttttcgaattcccagctgcttcagccattcttgtttatcaacgaattgatgtttcagtcctgtttttaaactgccttccatgcttggacattagcacaggaattctcctagtctaagcaagtgtccatatgcacagccatatctgtttgtgctcactgaccagtgcttttttagaggaggccgaagagagtctgtggtccattcaccttttgaatgtaaccagcattaaaatgttgggtgcatatttttggaattcatacaacaccatttaggacacattgcctttccaaggaagaaagtctcatagtattttctatctatcctgtcccgcagtgataggtaaaacactcttcgcatgtaagcaaaggattgttcataattaactgtcatgaagaacatggcagttttgtgttttaacccttagggtcaggtaggattgcatcctttggtgcttcttaagttacattgccagtgtttataactacttcaggaatgcttgcttcttaatattctggctttagctggaagcataagccaccagttttagatctcttctttctcaaatatatgaacttaaaagtggccaaatccaggctgggagtggtggcgcacgcctttaatcccagcactcgggaggaggtagaggcaggaggatttctgagatcgaggccagcctggtctacaaagtgagttccaggatagccgagactatacagagaagccctgtcttgaaggggaaagaaaaaaaaaaggcaaaatccatacaggcatggcttcctgtaaattttgatcagtagtatttaaattactcttctaggggctggcgatgtagattcgttggtagagtattttcctagcacacacagttctaggtctatcccagcaccataaaactggacatcatgataatttgtaatcccacctctcatgaagtggaggtaagaggatggagaattcagtgagtttaagggcagtctgggctatatgaaaccctgtcttaaaaaagaagcatggtatagttctcaagtatatgatagaaaaagaaaacaatcggggagaagtctcggtgactaagaacagccactgcataagcacaaggacctgggctccatcccagcgctcacaagcaggcctggcgtgtgataatttcatcattgtaggctgactccagcctcgttcagtgagaggcccagtctcaacggactatagcaaacagtgatagagcaggatattcaatgtctggtgtcctctgttagtctctggataggcatacaccacatacacaaatacaagtaagacggatatctaaaaatccttgggggggggggggtcctgttgaatttgtattaatttttttaaagatttatttattttatgtatgtgagacactatggctgtcttcagacatagcagaagagggcatcagatctcgttacagatggttgtgagccaccatgtggttgctgggaattgaactcaggacctctggaagagcagtcattgctcttaaccgctgagccatctctccattccccctaaaatatattatttagagatttggagagatggttaaaaacactggctgctctttcagatggcctggattcagttcccagcacctgcatgtgccttacagacttctatatgtaattctagtcccagggaatttcatgccttcttctggcttctgtgaacaccagacatgcttgtggaatacagacacacaggcagtcctggttttattgctgtgatgtgacatcatgaccacagcaactcttagaaaggaaaacatttcattgaggctagttatatagctcagaggtttagttcattattgtcatgggaggaagcatggcaacatgcagacagacatggtgctggagaggtagctgagttctatatttggattcccagacagcaggagagagtgacactggcctgtcttgagcatctgaaacatccacccaccgtagccctcttcctccaacaaagccgtttcaacaaggaggtgttcctaatagcaccattccctatgggcccgtgggggccattttcattcaacacaccacacaggcagaaaattcatatacattaaaaattttggggctggagagatggcttagtggttaggagcactgactgctcttccaaaggtcctgagttcaaatcccagcaaccacatggtggctcacaaccatagtaacaagatctgacatcatcttctggagtgtctgaagacagctacagtgtacttacatataataaataaataaatctttaaaaaaatttttttttgagaaatatttaacttactagtttttagctaattttaaatttgaactggtggtctaccaagacatcatgctataagaaacagaaactgtattatctggttgttgggcatagtgtgtgtctgtctttccatcagaaggaaagaatctacatctgtgtatttcaggtgttgcatgtacatttattgctgctgtctgtatctccttgaatgatcggttgttttatcatggcttagtatcccctctcatataatactttactgtgaatctacttcatgtggggttttcagccagctcagcctcaatgctcactgtctgcatgacattttttcttgttgattgtttttctaataagttgtctcatacacagcatagagttaagtcttcacttctgtttaaagtctctgcctttaggagctgggaacgtagctcctttaggagctgggaaaatagagtgcttacctaccatgaatgaagctctaggtttgatcttcagcccagcataaaaccagatctggtgatgtagccctgtagttcaagcacttagatagatggaagctgggagttgaaggtaatcctttactgtgtagtgagtttgaaactgcctgaagtacacgagaggtagcttttaaaataaatggttggggcaagtcctgtaccttgtaaatactttacatatagtttcttcttgacttataatgaggttatatccagaaatatcaatcaatcaatcaatcagtctctctgtctctctgtctctctgtctgtctgtctatctgtctatctatctatctatctatctatctatctatctatctatctatctatctatctatctatctatctagggtttctctatatagccctggctatcctagaactcactctgtaaaccaggctggccttgaactcagaaatctgcctcccaagtgctgggtatccagaaatctctttaatgtttaaaatattagccactgaattatgttgactctgtctagcctgccatcccacatcttcctcatcttatattgaccaggctggcctgaaatctgcctgcctctgcttcctgggtgctcagattgaagtgtgtgctgcttcgatgggtgtataaactctttgtagcctaggacatttgaggctgctgtgttacattcttacagtcctgacagagagcttcagttcattgctgataaccagtaccctgggcagattatacataccacttattgataggttgaaagaattgcatttaaaatttgaagttcatttgcactaaaaaaatcctaagtgttgctttggatgtggttggagttggtacttagggtggttctctctccctctgctttcttttctgctgtctgtctttctttctttctttctttctttctttctttctttctttctttctttctttctttctttctctctttctttctttctttcctcctttccctccctccctccctccctccctctccctctccctccctccttctctctctttctctctctctctctctctctctctctttctttctttctttctttctttcttcttttgggttactctgtttctagctctagcttgctccagcctctgcattcttttccctctgcctccccagtgctgtaattacaagtgtgcaccaccatgcctggattcaacattgtgtttgaagagttgtataggctcacatgcactcagacaaacaacgtcctcatttccagtgctgtgtactccttcctgggggggcatctctttttctggtttcctgtatgccaaaaagctactccctcataacacctacagttgtacattttgccagtccctttatgtgctattttttttaatgtctgtatgtttgttcaatgaaatttaatttacaaattaaagaaaagagattaacagtaagcagtaagaaggtagtgcaatatagcaatacactataattaagtttttgttttttttttttttgactcatggcactgagaattttatttatttatttatttatttatttattattttttaaagatttatttatttattatatgtaagtacactgtagctgtcttcagacactccagaagagggcatcagatttcgttacggatggttgtgagccaccatgtggttgctgggatttgagctcatgaccttcggaagagcagttggtgctcttaaccaccgagccatctcaccagacctattttttattttttaaggaattatttgtttctggaatttgcttggtttccatgggttaactgaaaccagatgaggctgcagtggttagagtaaactgcttgtgagaagtcttgatttttttttttttttttttttttgaaaagatctgttttatagtagtagtagtagttgttgttgttgttgacagggtttctctgtgtagccctgactatcctggaactggctctatagatcaagttgacctcaaactcacagagatccatctgtctttgtcaccacctttgagttaaattatttttattgcttttatttatgtggtgggggtcaaacatgaggagatcgaggatgattctatagagttagttctctcctctcatctctgcatggggtctgaagatcaaactcagtaggaagttcctttacccactgattcatcatgccagtctttgactttcatgtgtgtgtgtgtgtgtgtgtgtgtgtgtgtaattaagaggacaacttgtgggaagttggcttttctcttccaccatgtaggtcctgcaaattgaactcaagtaatcaaatggcagcaagcacctgtacacatggtcccatcttgctggcccttgacctttattcctgaaggatagttttgctggacatacaggattgatgtcaccttacatacagttggtgtcaccttcatgtgtatgtgtgtttcccctgcataaatgttgatgcaccacatgcatggctgatgccagcgaagccagagtgagggtactgggtttctcctggaactggagttaatagttacaacccatcgtgttggtgcaatgaattgaatctgagtcttctagaaaagtagccactgttcttaaccactgagccatcttctcagctttcaacatttaaaaatataacatattaaaggtgtatctttgatttttgcagtttgatggtgatattcctagacgtgtaactttctttatattcttgtgtttggcatttggaactcactaaaatatgtcttttgctaaatcgtaaggtttgagctgtgtcttccaatgccctggtttctatggttttggggtgagctgcttcagtttccacttcctcacgtgttttgtttctattcaagtcaattcagttgactttggtcactagacaacagctttccttcttgttagaccagcagtgagcagcatttgaaggaagctcagctggagtagacggcaagggcacagactgggctggggaggcatggagagtgctcacataagtgtccacatttgtgtcacatggtctcttcagattcagaatttctgtgtttttattttaaaagatcccctctacaagcactgaggctttatgtcttcttatttataaacaagattatttctcatgtttctgaatataattacaagagctaaatgtaaaatgtcagctaattgtagcatctgatcttgaggtatatctttgtggtcctttcctcttgagtgtggatcacactttgccatttcttagtgcacttgcagccttggcaatataattgtcatagcaaccgtgggctcgttatgttcctttcagatgtctgttcagtttcatcaggttaagaaacacatacatagcagcaaaactcttacttgtcctcctgtcactggagctgtctgtgggtttgcttgctgcctgtgtgctgttgctgttaactattaaagtgcctgtctgtgtaagttaggactgttggaggctgctttagcacttctcagggatgttccagcagactggctgatcatccaactgtgtaagacaaaaccattgaagtccgttgaagaacaggcggttgtccatttacgagtttcctatgccctccagggtcaaaacttaatagaatgtataggctatcttataggataaggaaaccctagaaatggatgtaattgggttcacaataactgaaagagtgttcattattactatttatattattatttataatttataggtagaatgtatattctttttttttttaattcaaaataattagccaggtgctgtggcatactcctttagttcagcactcagaaggcagaagcacaggactctgacttcaaggccagcctcatgtatagacttgagttccagaacagccagggctacaaagagaaaccctgtcataaacaaacaaacaaataagacaggcacatacatatgtacatgtgtgtgtgcgcatgcgtgtacgtgcactttttttcttttttttttttttgaaaatgtgactgttgcctagatactatttttaaggcgactggaacgtaggcacagattggtctcaatgctaatccctagggactgatgaagaaagagtggaaaggtggcctcagagctgctgttttgagacctttagttctggtcccgagggccatgatttgcctgcccttctgatgtaacatggcgttgccatttagtattgtgacctcgtagagtgagtagctagaacattctggtgtataatttttttcatctaatgaataattgggtgttttacatatttatgaatacagtgggttgtctttgggttttttttttgttttttggggggctgtttgttggttggtctgggtttttttctcccctccctctgaagagtattggtgaccttggatatagaaaaaaagattctgtctgtctgcaaagtcagctgtgaaacacagagctggtcagttacttacttctgttactgtcgtcttggtgtcccctccctccatgtcactccagcaaaaaggaagtgctactttcagggctaaccacacaggcaattgcagcacgtacctgtgcacagaacccatacatatcagggaagttctcagtgtcctgccttgttgagtgaaatttttttttaaagatttatttatttattatatgtaaagtacactgtagctgtcttgagctaagacaggatcactgctacaggatcactgtagctgtcttcagacgaaccagaagagggcgggtggtcgtgagccaccatgtggttgctgggatttgaacttcggaccttcagaagagcagtctggtgctcttacccactgagccatctcaccagcccccattgtgtgaaattttatgtaaccatttataatttgtcccttggcttggcagattttactccactctggcagaactatgtgactttcagatatcagtcttttcagttactcattttcttctccctcaaaatttttattgtattttgaggcagtctcgctgacccctgttccatccacagcttctaagaaatctttccagtgggtgtcagcagaaacatagctattctgtgcatactccatatcacagctcttgagaaagcaagcgcagtcacccgtatttttggagccttcccactggatactttcagtgtgcttgctgttcctctagttggcctgtagccctttctcccttggttccgtcactatctcccttctcattggttctgagctcctttgtgtccagctgctctactcaataagtagatgagcacacaaatgaggataaaaggaaatggaaagacacaggtggaaggatgaggtgttcccaaggcatagctcactgctatgtgctgtgcaggtgtgggtccgtgtgaatcatgaacccattgagtctgcctatagtttcacccatcccgtgacagacgttctgggcatttttattaacgtggttttcacagggagaggctcctaagattgagactttctagtcttggttatttatttgtgtctgctctttttcaggttatctgtcctgttgccggttcctggatgacaatcagatagttaccagttctggagacaccacatggtgagtacctgacaaggcagcaattgaggcttgaggtctgtctactgttcttgttaatactggttagtagggttacttcccattgcaagataaatgcttcttgatcataacctgacaattagaaaacaaagtatcaatgagtaactcattgcatcatctgtggatatgcaaagtttgattttgaacaaagaactaaaatgtagatatttaaactatagttgtatatcaagtacctggttttttctccatttatttttactcatgtatgtggtgtttttagccctgtggggttctttttcactgtaaaagtcaacttagcatattgtgagaatgagtaaagctttcaaacagcagctctgtcagatttgtttattttagaatgtttgcttactagtagatggagacacattcaagtaatttttccctttgtttattaatgaaatgaccagctggttattttaagagaatcattttaaacttaagctgcccttgtgggtttttctggtcgtgggagacattcctgggaggtcagtagcaatattttaaatttgatttagtagcatggcttacaggctggtgaaatccaacaatggactattgatgaaaatgttagccaggcgtggtggcgcacgcctttaatcccagcactcgggaggcagaggcaggcagatttctgagtttgaggccagcctggtctacagagtgagttccaggacagccagggctacacagagaaaccctgtctctaaaaacaaacaaaaaaacaaaaacaaaaacaaaaatgtagtcaggtggacagtgaagattagtcattacaaatttcaaattgcatgtgttgattattttcttggttgaaatatgtgaaacttttgtgctctgtgcttcttccttccagtgtccctcatgcctagcaaagataaccagcattcattgtagtgaacttggttgattggattggtgttgctgggtgagacaagctggtgaggttgacaagaatggacagtgtatcatgctgttgcttctgcgggttgcagcaggaagtagcctgactgccatttccatagccagctcccgctttatgtaatgctgatgatatcgtggcttttagccactctgtcaagcagaggcccttggaaaaccttgtacatccatgaagaccatctttggtttatggtcctcgttgcaagaggagttggagcatcagtttctctgagccacttatttacattcctagtgtctaggaaggtggaaaatgaggggatggaaagaataacacaggtgaaacaggctcctttctttcagaccttagcattttctgccatcccacaaactgcccatgattatcttgtgtgaaggacagtggctcctttgctgtagtgtgaggtaacctggaaacagcaggcccatatgctcatccatatggttgtttattgttttcattttcttttccttagcaaaatctcatcacagaagtaaatgtgtcttccccgtggcacagaagtcatctgtgattctgggtagtatagaggatgttgttctaggtgattggtcccatgtgcgtgcctgatacctacttttcatttcttcctgcaccagtgccctgtgggacatcgagactggccagcagacaaccacatttactggacacactggagatgtcatgagcctgtctcttgctcctgacaccagactgtttgtctctggtgcttgtgatgcttcagccaagctctgggatgtccgagaagggatgtgccggcagacctttacaggacacgagtctgacatcaatgccatatgtgtgagtttaaattgtctgctttagatctcaacctttgttgttgttgttgaagatttgggtttttttttagggtctggagagatagcatattagttacttttctgttgccggaacaaaaacaccatgatcaaggcaacctaaagagaaaaaacatttcattgaggcttacagtttcagagggcgaatccatgtccatcactgtgaggagcctggctgcaagcaggcaagcatggtgctaaagaagtaactgagagcttcatcttgagatataaataatcacaaggcagagagtgagtgagcgaaaacttggaatggcatggccttttgaaacttcaggcatccaacaaggccatactttttaatacctcccaaacagttccacgaactaggaaatgaagtgttcaaacttgagagcatgtgggatccattctcatttatatttgtgtctgcctgtctgtgtatctgtatctgggtgtgtgcatgcgtattagagccaagtaggctgttaggagacacctgatatagattgggtgaaccaaacttggttgtagtaaatggcttttaaagtacctttaaagtaccactacctttaaaaacattttttttcaaagtttgttttaaaatttgtgctctggttttttgtttgtttgttttgttttttctttgtgtttattctgagaaaaggtctagtagtataacctaggcttacctagaactggaagtctctctagcactaagatcacaggcaggcctttctaccaaaccaggttgtccttttctttgcaaatacaaccagagtcagagtgttttagaagcagctaaaaccctgtgctgtgcatatatttcagacactgatgaagccattaggtgccagctcaactcttccttttttttaagtgaccagtaatttagaggctgaatatcttgccagctaagggaatggcaaatttagaacttactttcttgctagcacctcctgaagagatgagtctggtgactagagcagtgacttgctccatcctccacaagtccctcctgacagctcgtgtccagaggacagaagcccttcagcagtgcctcagtctcattgcttttctgtactgaagtctgccttgttgacagtggcagtccatgagtactatgtcagtacccccctagtacatcccccattcactctaggatgacagcccttattcttgctggaacatcatcctgttttcctttccatggcagccatgcctctgcattaacatcatgtcttgttgaacatttacttttatgttagtatatataattcagcttgaccttgaattcactatgtgcctgaaggctgtgtactctattccatggttgattacagattactacactttttagcctcctgtgcttgtgcctgaactatgggccttacccacgccaggcaagtgttgaatcagctggcctgtgccccaggcctcattgtttacatatgtcttgatttgtcttctctttttagttctttcccaatggcaatgcctttgccactggctcagacgatgccacatgcaggctgtttgacctccgtgcagaccaggagctcatgacctactcccatgacaacattatctgtggtatcacatctgtttccttctccaagagtggccgcctcctccttgctgggtatgatgacttcaactgtaatgtctgggatgcactcaaagctgacagagcaggtcagtggccacatggcctttctgtgttttgggggcaccagcttgcttctttctatgtggtaaaatgaggttcagatgagctgaaatgtgtacatttgtatcatcagcttagttatgtcatagctcagcagaggggacagttaaaggccacataatttgagctctggcactccaggaagtaccaaaagctctcctgtgaggagaatgtgggagttgatagtatgccagataccactgagttcaatgttcaagtttcccattttgtcctgtgggtatccatggttagcctaaaacactctattagaccagatgtccttgaatttaaaagtcttctgattcagccttctaaatactagaattactggtgagtaccatcaattttcaatctttctgactcattctctgtagtcacttagcttctgacatattccaccatggacagctccatcttcagctgtctgagcctatctatacagctttggcatctgatgccatgccccttcgtctgtacaaggttgttgaacactgtgctggttgctggtaatgattcaatttaaagcctgaatttaatatgtcagaatcaagtggattaaatacaagctggacaaaagattagaaagtttttgtctcaagagtctccctttgagctcaagctggccttaagcttcaagttgaagagctttattacattcaacaaatctgctttggaggagggagggagggttgtgaccatgaatctcgtgggtcccactgtggctgcttataacccaccagactactgaattgaggacagttttggtggctcacacatttaatcccaagtctcagaagcatgcaaattctgtgagttgtaggataaccagggcctgtctcaaaaataaaaatcaacatttctgcctttgccattgtagcccaggaagttgactctgagtttaagagaaccttccagcccttgttcttagttggtacatcaatagctacaggactaaatgtttctgaagtttcaaacccttctgtgagagaaggggtgttttagcaggtgatgtgccatgtgacaatgggtccatgatttcaactgtaggctctgtgtaccctgtggttagttgttctgagtttactattcaggcttttggttttttgggtcattatgttttgttttgttttttttagagatttatttattgtagctggacactggtgggttatactttaaatcccagcacttggggaggcacaagcaggcagatctgagtttgaggccagccaggtttacagtgagttccaggacagtcagagctacatagagaaatctgtctggtggatggggtggatttatttattttatcaatatgagtgttttgcctgtgtacctgcagaggctggaagagggtattgcattcctctggaactagagttacagatgtttgtgagacgccatatgggtgctggaaaccaagctcagatcctgagacacagatggatgtttattcattatttacttgtttgttcatttgtattttctagacaaggtttctctgtagccttggttagcctggatcaccagatctgtctgcctctgtctcctgagtgctgggattaatccagcatgtgcgattaaaaggcatgcgccaccactacccatttttgtatactatcagctttttgttggtgtacaaaaattatcccaagggggtctgtgtttatgtccttgttcttcttagagaagaacatgttatgattggttgctctcttaacagaattgcccatacacctaaggatcgtttctacttggataagaaccttctccctttgtagtggccttcccttgccctcttaagtgcttgttttaccaaagtcttgtagcgttgttcatccagatgagcctcctgctttgtcacagcctcatgtgtgtttgtggttgtgctctttttgttctcaggtgtcttagctggacacgacaaccgagtcagctgcttgggggtgactgatgatggcatggctgtggcaacagggtcctgggacagcttcctcaagatctggaactaaagccaggaggtaatggggcagtcccattcccaggacatggcattttcctatatgggttatagatttacagagatcttgttgatctggcattgtagcagatctgcagtgaaggcccttagctgtgatgcagagaacagtgggaagagctcgggttctttctgtgtgcactgactccaggctctgttcacagcagcaggtggatggatgccatggcgactggaagaccattccaaccttgaatcgttacagcgatagcatatcctatccaaccatactaacgtggacacccacacctcccctcagaacttcaaaagggcaagatcttttttccttcacttattgctgaaaccaagagcacaattcccattaagagaaggatctctgtgctgtaaactaaacaaattgtgcattttttctggggccattgtttttggtttattttgttattttgttttgtttttgtttttttggtttcattttgttttgggttggtccaattttaaaaggaaatactacaataaaaatgttaaccagaaggtaaccctgagtgtgattgtgagagagacacgcctttttactagttcatttgcatttaaatcagtgatcctgttctgtggcattcatgaaaaacaagttgaagaatttgtttatctggaattgtttctaaatataagtcatttgtagcaagactttggaagcattctttcttaaacatattcctttatgttcagtagttaagagaaccagggcccacggcggtctctgacttgtcactgatgtttttttttttttttgtccctggcttgctttttttttttttttttttgtctcatgtcacagatgactgtttcgcacaaacacagcatagtggaagaaaaaatttcagaagcaaagtagccaagcacatgttaggatggccacgaatgcttggtcagagtccttccttcccttgctcagcagcggacttactcccagcgccttccctccctcctgtccctcctgtcccctcactgtccactttctgttctttccttgggtttcctgtgaagttggagggacgtttgtagtcatgtgacactagccgtcctgcccctgctgtcagagatttttttctccagagaggtgcctgtcctgtgcttggatagtcagttggttatttgtgtatgaaacaatgtacaaatcaatgttttgaaaataatgatctcagactttctaagttaaattttaaacaatttgattgtttgccatattgggtggggttactcttagaatcgcatgctgtagaaatgctctaaagtgcatataggactcagtccttagatgttctttttattttaagaaataacctcttcaagttgtaaccgtggcggctttgtccattactgttgctattctgcacacatatcggaagcagcaagcgctttacacacttgagtagtgggataagtcactgttttctttactttacaaaacaaaacagtcctgttgggaatgattgctgttggattctggaagggaggggaaagctgctctgctgcctctttgccacttcctggaagccttcctccctggaagaacagccttttgcatctgaggcgaccatttttacaccatgcagatcttcgtggttatcatctcaaagccatgttcagcagcagcgtttggacagcagtgttctgtgggccctcccctcccccatatcctgcaccccctcatagcagtagtggcttcgccattctgttttctgcagtgtcctgtacaaaactgtgctgtgactgtgcggtaggcctggacatggcaaagagaatacagcgaagccccttctcttcctaccaaacaactctgtagagctctctgcaccctgtacccttttcaccttttgtatttaattttaaagtcagtgtactgcaaggaggctggatgcaagatagatactatattaaactgtactgttatttaagatgtaataaagcagtttgacatgagggactctggtgtgatggttatttgagggtcatcttcagtgtgtgggggtttgccccaactgctgactcaacagttatataacgtcatgagagacccttataaaagtgtcagctcgggctgaatgtagtagtacacacctttaatcacaacactcaggaggcagggccagatggatctctgaggttagggccagcctggtctactttgcaaattttaggactgccaagcaatatagacactgtctcaagggacgtggggagatgggctcctgggaggtttctggtatatatctcaggtctgcagagccacatgtttatcacgacaagtggcctttcaccctcagcacctgggccctgtctgccgtctcctgctggaccagccagctgcttcgacttcctcttcctgcactaaaatgtctgaggacctgcccctccagagatactttcctgttgactaagcaccatttccttctctgtcgataaaggtcactgcatcttgaaggagcgagtatcaacccctgagttgttggactgccattccagcttctgacacccattccactgcagtgcctgcttctaagttttatgataaaaattttaatcttaaggttttttttgtttgtttgtggtgagtttttttggtttttttcaagacagagtttctctttgtagaactggctgtcctggaactcactctgtagatgaggctggcctcgaactcagaaatccgtctgcctctgcctcccaagtgctgggattaaaggcgtgtgccaccacacccggcttaatcttaaattttaagattataaaacataactgatcttcaggctcacatcccctaaacattgactggccccagccaccttgtttggacaatggtaagcaaacaaatccatccagggtcagcggtggcccctgataccacacattgtggtgtgatgggcaggtccagcagatgggatgggatggcctagtctaatcctctcctagtctccttgaaataaatgtatttttcaacacacacattttgcaagtctttacctacctcaacttccactgagaatgcaaaacatttgaggtccttctgatctagaaggtgaagctctgaccctaacttcaaattctctgggagtacatgtcttaaactgcttctaacctacctgacaacaagcaggccccaaatggactggggtagatctgtgtctcaggcctgtcctacttctcaaccaacatccaggccgctgcccacttgtttaacaagcagtcatggaagacatgtccactttggatatgtgggcagtattaatgaccaaagagcgtgcaggcttcacaaatgctcaggcttacacatctacatccaccattaaataccactcatgctctggaagctgaggtgcccgtgtgctctgtgtgttgctgcccatggtggaagtacacctgttgaagtgcacacaggcagataaggggctgctgctatattttagacccaccatgtctcatcattttcctccagcgtatgggctgatgccattccatgaccccaggattccaattcttctggcctgtaaagggagccacctcatttatttgccaaatactagaggctggaatcctgatgaaaggccagccgggtccagcttgtgccgtccaccgtttcctttggcgcctactctctcctgccgctctcactgtgctcctgtattctcagtacaacctgacaccaccagcattctgttagaccagtccaacccctcaccatccaagagcagccagcagtctttcacctctgcctcttcacacagggtgatcttgggacaaggtgtttgctctgggaacccatgaatagtctggcaggaattctatgagaacaaagtgcctggtgtgagattacagctggtgactatgtaacccactgttcccttgcctgagacatttctaagcaccctaggcaagactactctgcttgctgtatccaaaacgtgagtacctggcagctgtcccactgatttggcagaagaagggataaggttgcccctcacccaccccagtgaagtgaccctgatgatgacctcagtattggtctttacctatgccaagtgcactttcggagaatggacaagataactagtatcccatgacaatcaactctcctctaaaatacactcttctggctagctgtcaccttgtttaggtactggacagccttcacaaagcagtttatcccaccctggtcacatgaaaccaactttcctcttagtactaaggcaggacccaaagagctacaaagcctccctgatgcctgcgcctgagagcttacctgaagggacaccccccccccatgtgacaacctaactttgggcacaggcccatcctgtttcctccttgttcttcctcctcccttatcatttagcctttgaagagtaacctccaggtactggaggcctgaagcaaaaatgtgtgtaattgccttgatttcgtcctgctacctcactcatcccatgtgacctttattctgctgctccttgaagccagcccaaattaaacactctaggagtcttttgagtaccctcttgccattccaagccttgaccttgaccttggcgactgtctttagcacagtggtgggaatgagcacttggtatctgagtcttcagagtttgatggggcccagtaaaacatttcacaatgtcagctttgttccttcctcagaaatggagaagccacctgcataatctaggccttgcccccactgtgtaaaacagatttccctagcaaccactggacatctgctcttttaatttaaggctacacaggttacttggtatgtgaccttggactgcagaccatagactgggtgcctttgcagaagaatatgactgctcccactctggatgtctctccaggtctgctggccatgtgcctgccatttaccactagataccaatcaagtgttatataatacaatagcagcatagttacagccttcggtgggtgtggctggcgttcactctggggaagaagttaggcttacaaaactcatgaggaagttacaaaatttaagaaatccccgcaaattcccaccatcctccctacccactattttccgtccccactgcattgatgtgttctttttggaaggacagcacacaggtctcaggagttcccaccagagaacatcctgactgcagcaggtatggggggctgtggggaagcgtggagattgggctatacaggaagggcaatagtgtgaacatcttaaaactacagtgctgggagtcgggactgcgaaaacacctactggtgcactgtgcacactggtggatatcaatgcacgagcatgtccaccagttcagcatatccctggctcagctacaaagtcggtggcctccctctttccctccttacagctgtgggtgaggcacgctatttacacagtcgcttctcaactatcaagactttgtttttctttttgagatagggtctctaactatggtacccctggctggcctcgaattcctagaaatccggagctctcatctctgggattaaagtagtgaaccattgtatcaaccagctgtcaggtttgttactttcaggctcaagtccttgacagttgccaaagggtgtcaggtcactgctggtgggcctgagagccatatgagcgctgtcacccgagttctgcttctgaaagataccaggtccatgcgctggacattaagaacaacgtgggaacaggagcctggcacgaagcccaccttcccacaaagctggcccgcgttgtccacatggtcctggagacctcgccagcaaaaagcaaactgagtgtgacgtaggacaggaataaagatcagaccgcgaggcaaggaggcaaaaaaagaaagaaagaaagaaagaaagaaagaaagaaagaaagaaagaaagaaagaaagaaagaaagaaagaaagaaaaaggagagaatctggtggttttctctgttgctgctgggactgagctttttgcccctcctcggttactctttttttttttctttttttcttttttttctccctcacccctctgccccgcctccccttccgccccgactcctccaccctttggccccgcccactctcccgatcttccccttccctccggcttagtctccttagttccgtccctttccagctctgccctcttgcgacctgtccctcccactctgcctgccccttctcctaccccgtctgcccctcccctttctccaacccttggccccacccccccgggctgtcttccgctccttggccccatcccattccgctatgccnnnnnnnnnnnnnnnnnnnnnnnnnnnnnnnnnnnncaccccccagcctctgatccttggcctacaaagggttttgaaaaacccgaagtttgcgtgcacgcctgtgtaggtgcggctgcgccgctctccccacgtgccctgcagcgcatgcgtgcgggctgcgcttgcgcactgacagccgcggcgcagcggggcttggtggtgccggtctctggaccgagcggccatggggtggcgggcggctgggtcgctgagagccaggtagcagtagggcagcagggaccgcctgctcggcccagcatgtagacgtccacgcgggcgcgcggcagccgacggtgagtgcggggcctggggtcgccctctgcccggcgtcactggccgggacccgtgaagacagggtcacggcgccggccctgcccacctgcccgaggccgggcgctggtggctctgacgcgcctccctgcgtccgaacgtgggttgcagccaggatgacgcgtggtctcggggaaggagcctaagggacaggtctgaagatctggtccggccttgggtttagggggacgagtcagaggttcgggtcccgggagaagccatgtaggccgccgttctgttctaagccagttcagcgcgcagcaccgcagccgaatcggctccattggtcttccagtggggccttagcaagcgccagagaccttggcatgtgggcaaagtagtcagacgagcgttttgtaagcaatcgaggtgtgaaactctccaaaaccccatcgtaaacttggtatccagtacttgccaggagcttccaaagtcctgaagagtccatggagatgttcctagaggctgctgcctctcaggatgtcacactcacaggccgcttgtcttggcctctggcaggtttcttcgttatgggaacagggcgtgcccagcgcagtcccaggatctgcctttgcttggccaagatccggcgtctctttccagctctcccaagcaatgggctttctcctggcattgattctgaatagcgacttgtttttcctttcttgtttgggaaactctctgttttggttcaaaacttattcgtttggcttgcctcttgagaagagtgttattcaaacttatattcattggtttcatgtatcactgtcagtttccacgggccggaaagctggcatcctcgccttggtaattaaaagcacggcaccttccctctgaacgtatttgtcctcagcagtgacttcactgtgacttacactgcccatcttgggctctgggacagccacgggtgccaatatacagtatgaccaggtagcttcttcatttggaggtggcatctcagaatgcttctgcattttcttctttgtagatttatttattaaaaacgatgcagttttattcattttttttctttttcatcttgtttgaagtgctacaggtccagcccagatcctcacacaagtgctgtcccactgagccacaatccatcccccacccctccttttgggtagaagtggctaacagataaaacagcagtacttaaatgaatagtttagctctctaggcatcacttggagatggagagaagcaagtggtggttttttccttttttttttaatgggagtggacacttgctactctactgctcatgaatggaaggaagagcttccaagtgttggttttctcctcctgctccatgggctccatggatcaaacccaagacatcaggcttggcagtaagtgcctttgtctactgagccatctctctgatccttcctttgtttttagacataactttatgtatgccaagctgatttctaattccctgtgtagccaagggtgactctgaacttcttgtcctgtatgttcctctgcatgttgggattacaggcatgaaccaaaccatatccagttgggctttttcttgttttaatgtgatgttgggatgaagcccagggctttgtgtgtgcaagcactgtaccaactgagctctttttcaagccttgggtggtttcactctttttttttctttctttctttcttttttttccagggtggaggatggagttcaagacagtgtttctctgtcctggaactcactctgtagaccaggctgcccttgaactcagagatcccctgcctctgactcctgagtgctgggattaaagacgtccgggcaccaccacccaaagtcctactcttaatgcttttttttttttttttaaagatttatttatttattttatatgtatgatgcaccagaagagggcatcagatctcattacagatggttgtgagccaccatgtggctgctgggaattgaactcaggacctctggaagagcagtcagtgctgttaaccactgagccatctctccagcccccactctaagatttactttattttggatttatgtgtatgcatgtgtgtttgcgtgtggttattatgtgcacacgagtatgtgtgccttggaggcaggaagagggtgtcagatcccttagagttggagttacagatggttgaaagctgccggatgtgggtgctgggaaggaagctcaagttctctgggagcagcaagagccttgtaactgctgaggcttcgccctctcaggtgttgggaatggattcatctccatctttaccttgaatctgtctgttttctggtgtcgcagcaagagggagatccgtgcaaaatgctcagcacgcggaggaggagccttgggaggacaagaggggtgggctttgatctcaggctctgctttctaggacttgtgagatctgtttacagttaccacatggctcctgccctcctgaaggcagaggtgtcgctttcaaccccaggaaaccatcctaattgtttgtgatagttgcttagcttatcattgtcctctattctgatccatggcacctgtcctcccagggctactgcattgggaacaagttcgtgaaaacaaatgatcgggttaaggcagagacggtactagcaatgtacgccagtgctgtccacggtgcagtggaaagggcagcagcgcctgaccacttagccttctagaccagagtgcctctcttgggtctgtgaaactattccaccactagatgggttctgtgatcccgttccttagaactttccagaaacagcacacttctctgacctgtctgctagcttgggtatcatttatttgtagaaatgaggtaggtattaggtaatcactaaacctggactctgtggctcacagtagtgataccatcatgtttgatacagcaacacgttgtctcataaaacaaatgaacaagaactggaaacttttccaacttggtattaactaatgaagttaaacatttacctgttgctttcactaattttccttctttttattttttttctctccatttcttccttcattccctctattttcaaagactcagacttttgtcacacagattgcagtcttcctcctgcgtgctgagtgcttgggtcacgggtacgcaccaacacacctggcttcgcttttcatttaccgcttctacatatatttgaagttcacatggaattgaacgtttgtattacgtttcttgggctgactctctgtgtgttcatgcctgcctttggttcctgttgtacatgagcttattgacattttgatatctttcttgctactccatgatggtgactcagttccttttccaagccagccaagctactcaacaatgaaaaaaatcccaacagggataactaagtgcactcaccccccccagctacctcagcacctgataatcatcttgcctagcctttgtttccgcttcactttctagaccttgcttgaagagttacctagggaaaggttggcgacgaaagaattaaataatggaattaaatagaattaaaaacagaggaggagggatgatgggtcagtcctagcaaccacccgggattcactcccagggaccctcagggtaagaggagggatttaggggctgcccttcgattgccacgggcagattgtgtcatgcgagtgagcatgtgtgcaccaacccataagtaaatacgtgtatctgtttatttacttaattgggttttttttttcttttaaaaaaaaattgggggagggggtgttgggatgttcaaatcagggtctctctctctgaagccctggctgtcctagaactcaatctgtagaccaggctggcctcactttagagagccacctgcttctgctgggattaaaggcttttataccacgatctcctggtttat

SEQ ID NO: 236 - DNA, 1410 bp, Mus musculus
gcttggattctgaagtgtggaaagcactgagacgtgaagatgagtgaacttgaccagctgcggcaggaggccgagcaactgaagaaccaaattagagatgctcgtaaagcgtgtgccgatgcgactctttctcagatcacaaacaatattgatccagtgggaagaatccaaatgcggaccaggagaacactgagggggcatctggcaaagatttatgccatgcactggggcacagactcaaggctccttgtcagcgcctctcaggatggaaaactcatcatctgggacagttataccacaaacaaggttcatgccatccctctgcgctcctcttgggtcatgacctgcgcatacgctccttctgggaattatgtggcctgtggtggcctggataacatctgctccatttacaacctgaaaactcgtgaagggaatgtgcgtgtgagtcgtgagctggcgggacacacaggttatctgtcctgttgccggttcctggatgacaatcagatagttaccagttctggagacaccacatgtgccctgtgggacatcgagactggccagcagacaaccacatttactggacacactggagatgtcatgagcctgtctcttgctcctgacaccagactgtttgtctctggtgcttgtgatgcttcagccaagctctgggatgtccgagaagggatgtgccggcagacctttacaggacacgagtctgacatcaatgccatatgtttctttcccaatggcaatgcctttgccactggctcagacgatgccacatgcaggctgtttgacctccgtgcagaccaggagctcatgacctactcccatgacaacattatctgtggtatcacatctgtttccttctccaagagtggccgcctcctccttgctgggtatgatgacttcaactgtaatgtctgggatgcactcaaagctgacagagcaggtgtcttagctggacacgacaaccgagtcagctgcttgggggtgactgatgatggcatggctgtggcaacagggtcctgggacagcttcctcaagatctggaactaaagccaggagcaggtggatggatgccatggcgactggaagaccattccaaccttgaatcgttacagcgatagcatatcctatccaaccatactaacgtggacacccacacctcccctcagaacttcaaaagggcaagatcttttttccttcacttattgctgaaccaagagcacaattcccattaagagaaggatctcagtgctgtaaactaaacaaattgtgcatttttctgggccattgtttttggtttattttgttattttgttttgtttttgtttttttggtttcattttgttttgggttggtccaattttaaaaggaaatactacaataaaaatgttaaccaga

SEQ ID NO: 237 - DNA, 1023 bp, Mus musculus
atgagtgaacttgaccagctgcggcaggaggccgagcaactgaagaaccaaattagagatgctcgtaaagcgtgtgccgatgcgactctttctcagatcacaaacaatattgatccagtgggaagaatccaaatgcggaccaggagaacactgagggggcatctggcaaagatttatgccatgcactggggcacagactcaaggctccttgtcagcgcctctcaggatggaaaactcatcatctgggacagttataccacaaacaaggttcatgccatccctctgcgctcctcttgggtcatgacctgcgcatacgctccttctgggaattatgtggcctgtggtggcctggataacatctgctccatttacaacctgaaaactcgtgaagggaatgtgcgtgtgagtcgtgagctggcgggacacacaggttatctgtcctgttgccggttcctggatgacaatcagatagttaccagttctggagacaccacatgtgccctgtgggacatcgagactggccagcagacaaccacatttactggacacactggagatgtcatgagcctgtctcttgctcctgacaccagactgtttgtctctggtgcttgtgatgcttcagccaagctctgggatgtccgagaagggatgtgccggcagacctttacaggacacgagtctgacatcaatgccatatgtttctttcccaatggcaatgcctttgccactggctcagacgatgccacatgcaggctgtttgacctccgtgcagaccaggagctcatgacctactcccatgacaacattatctgtggtatcacatctgtttccttctccaagagtggccgcctcctccttgctgggtatgatgacttcaactgtaatgtctgggatgcactcaaagctgacagagcaggtgtcttagctggacacgacaaccgagtcagctgcttgggggtgactgatgatggcatggctgtggcaacagggtcctgggacagcttcctcaagatctggaactaa

SEQ ID NO: 238 - DNA, 50396 bp, Homo sapiens; identical to SEQ ID NO: 235
  misc_feature (2660)..(2731): "n" at positions 2660 to 2731 can be any base
  misc_feature (46151)..(46186): "n" at positions 46151 to 46186 can be any base

SEQ ID NO: 239 - DNA, 3088 bp, Homo sapiens
atgggcggcgagtggggagcggggccgggagtggagcagccgccgcggcggactggaccgagcctcgccggcgcgcacctgcccgcagcgcccgcggacgcgcagcgcggcccgagcgcgacgacctgccgagcggcggccgaggcggcggtgtgggcgcgtcaggccgcgacgagggcgctgagacaaatttacatgtattggagaccagaccagaagcccttctgaattaagatctcacattcttgaaggtggcattgaagagcactaagatcggaagatgagtgagcttgaccagttacggcaggaggccgagcaacttaagaaccagattcgagacgccaggaaagcatgtgcagatgcaactctctctcagatcacaaacaacatcgacccagtgggaagaatccaaatgcgcacgaggaggacactgcgggggcacctggccaagatctacgccatgcactggggcacagactccaggcttctcgtcagtgcctcgcaggatggtaaacttatcatctgggacagctacaccaccaacaaggtccacgccatccctctgcgctcctcctgggtcatgacctgtgcatatgccccttctgggaactatgtggcctgcggtggcctggataacatttgctccatttacaatctgaaaactcgtgaggggaacgtgcgcgtgagtcgtgagctggcaggacacacaggttacctgtcctgctgccgattcctggatgacaatcagatcgtcaccagctctggagacaccacgtgtgccctgtgggacatcgagaccggccagcagacgaccacgtttaccggacacactggagatgtcatgagcctttctcttgctcctgacaccagactgttcgtctctggtgcttgtgatgcttcagccaaactctgggatgtgcgagaaggcatgtgccggcagaccttcactggccacgagtctgacatcaatgccatatgcttctttccaaatggcaatgcatttgccactggctcagacgacgccacctgcaggctgtttgaccttcgtgctgaccaggagctcatgacttactcccatgacaacatcatctgcgggatcacctctgtctccttctccaagagcgggcgcctcctccttgctgggtacgacgacttcaactgcaacgtctgggatgcactcaaagccgaccgggcaggtgtcttggctgggcatgacaaccgcgtcagctgcctgggcgtgactgacgatggcatggctgtggcgacagggtcctgggatagcttcctcaagatctggaactaacgccagtagcatgtggatgccatggagactggaagaccattccaacttggacgcgttaccatgagagccaaccgtactaacgtgacaaccctacacctcccctcagaacttcaaaagggcaagatcttttttccttcacttattgctcatatcctatgaaaccaagagcacaattcccattgagagaaagatctctgtgctgtaaactaaaacaaattgtgcattccttccggggccatcgtctttgttttcttttttgtcttgaatgaattttaaaaggaaatatataataaaaatgttaaccagaaggtaaacttgagtgtaattgtcagacagacacacttttccaccagtgtatttgaattttagaccagtgaccctgttttgtggcattcatgcaaaacatgctgagggctttgttcatctggtcatcgtgtccaaatttcagtcatgtttgtagcaagattttggaagcattcatatttcctttttaaaatgtattcctttgtgttcaacagttaatcaaaaccagagagtctagggcagcctctctgatgttgtcaatgatgtaaattcagtccctggtttttaattttctgtctgatgtcacagatcattgttgcacacaaacgtggcatagaaaagaacatgttcagaagccatggggccaagcacaatgcggggacggtctcaaaatgcgtgatcagagaatccttcaccttatgctgaaaagtgagctcagatccacctccaatgttcctcctgacccatcctgtctatcttctcagttgagtttttaatctcactttgggtttccttgtgaagttggagggaagtttataatagcctaacactaccccacccccaactaggaggaacctctgttttcaagagagatgcctgtcctgtgcttggatagtcagtcaattatttgtgtatgaaacaatgtacaaatcaatgttttgaaaataatgatctcagactttctaagttaaagttttaaaaattttgattgtttgccatattgggtgggtttactcttagaatcgcatgctgtagaaaatgctcaaaagtgcatatgggactcagtccttaggtgttctttttcttttaagaaataacctcttacagttgtaaccattgcggctctgtccacttctcgttgctgctctgtggcacatatcggaagcagtacagcgcgcggctctacacgcttgggtagcgggataagtcactgttttctttatttctttaaaaaaaaaaaaagttctgttgcaaacgactgctgttggattctgagggtggggagggagagagagggagggagagggagtgaagagcctgccctcctatagtggattcttcacgggccctccacatctgaggtggctcattcccatcacacacagattgtcctggtgttcatttcaaggccagttgtcagcagcagcgtttggaaagcaggttctgtgggaccccccgccccgccccccgcactccttcatagcagcagtagtggcttctccatcctgttttctgcaacattctatacaaaactgtgctgtgaccttgcggtaggcctggatctggcaaagagaatacaaatgaaaccccttctttctctttccgtccaacaactctgtagagctctctgcacccttacccctttccaccttttgtatttaattttaaagtcagtgtactgcaaggaagctggatgcaagatagatactatattaaactgtactgttatttaagatgtaataaagcagtttgacatgaggg

SEQ ID NO: 240 - DNA, 1023 bp, Homo sapiens
atgagtgagcttgaccagttacggcaggaggccgagcaacttaagaaccagattcgagacgccaggaaagcatgtgcagatgcaactctctctcagatcacaaacaacatcgacccagtgggaagaatccaaatgcgcacgaggaggacactgcgggggcacctggccaagatctacgccatgcactggggcacagactccaggcttctcgtcagtgcctcgcaggatggtaaacttatcatctgggacagctacaccaccaacaaggtccacgccatccctctgcgctcctcctgggtcatgacctgtgcatatgccccttctgggaactatgtggcctgcggtggcctggataacatttgctccatttacaatctgaaaactcgtgaggggaacgtgcgcgtgagtcgtgagctggcaggacacacaggttacctgtcctgctgccgattcctggatgacaatcagatcgtcaccagctctggagacaccacgtgtgccctgtgggacatcgagaccggccagcagacgaccacgtttaccggacacactggagatgtcatgagcctttctcttgctcctgacaccagactgttcgtctctggtgcttgtgatgcttcagccaaactctgggatgtgcgagaaggcatgtgccggcagaccttcactggccacgagtctgacatcaatgccatatgcttctttccaaatggcaatgcatttgccactggctcagacgacgccacctgcaggctgtttgaccttcgtgctgaccaggagctcatgacttactcccatgacaacatcatctgcgggatcacctctgtctccttctccaagagcgggcgcctcctccttgctgggtacgacgacttcaactgcaacgtctgggatgcactcaaagccgaccgggcaggtgtcttggctgggcatgacaaccgcgtcagctgcctgggcgtgactgacgatggcatggctgtggcgacagggtcctgggatagcttcctcaagatctggaactaa

SEQ ID NO: 241 - protein, 5 aa, Unknown
  cytokine receptor extracellular motif found in many species
  MISC_FEATURE (3)..(3): "Xaa" at position 3 can be any amino acid
WSXWS
